United States Patent Application Publication US 2008/0233582 A1 - sequence listing, part 2

SEQ ID NO: 33499 - DNA, 33 bp, Homo sapiens
agtgaattctaataacagtctggtcgcctttgg

SEQ ID NO: 33500 - DNA, 33 bp, Homo sapiens
caatgttctgtgctacaggttcaaaggaagaaa

SEQ ID NO: 33501 - DNA, 33 bp, Homo sapiens
accttattgtaaccccaggatgctagtaaccct

SEQ ID NO: 33502 - DNA, 33 bp, Homo sapiens
caggtctctcttctataaagccaggacaatgat

SEQ ID NO: 33503 - DNA, 33 bp, Homo sapiens
ccctgccaagcttcacactgttttgagaaagac

SEQ ID NO: 33504 - DNA, 33 bp, Homo sapiens
ctgtcatcacattatcgctgcaattttccctgc

SEQ ID NO: 33505 - DNA, 33 bp, Homo sapiens
ggataatgttcccctccgagagtctccagggtg

SEQ ID NO: 33506 - DNA, 33 bp, Homo sapiens
tctgccttccagccgacgcaggagctgttagtg

SEQ ID NO: 33507 - DNA, 33 bp, Homo sapiens
gtcaacaatcgggtacactgtgtctaatttaag

SEQ ID NO: 33508 - DNA, 33 bp, Homo sapiens
tttttttatttgtaagcagatggacatgagaaa

SEQ ID NO: 33509 - DNA, 33 bp, Homo sapiens
gactaactttaagtgacgtaagcaaaggtatca

SEQ ID NO: 33510 - DNA, 33 bp, Homo sapiens
ttgtgcatcactaagaccgtttttgactttaaa

SEQ ID NO: 33511 - DNA, 33 bp, Homo sapiens
aaaatgttggaagaacagattcgttgcctattt

SEQ ID NO: 33512 - DNA, 33 bp, Homo sapiens
attacaaatctgcaacaagtgtatgaaaatgtg

SEQ ID NO: 33513 - DNA, 33 bp, Homo sapiens
tagattaaattgcaagcatctggacattgttta

SEQ ID NO: 33514 - DNA, 33 bp, Homo sapiens
tgccgccttgcagttcgatcagacttctgtgct

SEQ ID NO: 33515 - DNA, 33 bp, Homo sapiens
atgtagcaattactgaagctttgagattttatt

SEQ ID NO: 33516 - DNA, 33 bp, Homo sapiens
atcatcagtctcccaactcctctactgaatcat

SEQ ID NO: 33517 - DNA, 33 bp, Homo sapiens
tgacaaaacgttaatgcaacaggcctgcccatg

SEQ ID NO: 33518 - DNA, 51 bp, Homo sapiens
  1: PARK2 , rs951196,  Parkinson disease (autosomal recessive,; juvenile) 2, parkin ,q26
ngagagatggaggcagggcagttctatagtcttcaccacagtgattctttc

SEQ ID NO: 33519 - DNA, 33 bp, Homo sapiens
ataagaagccatcaaagtacattcaaggactta

SEQ ID NO: 33520 - DNA, 33 bp, Homo sapiens
ttacagatgcaacataactttacagaggccttt

SEQ ID NO: 33521 - DNA, 33 bp, Homo sapiens
gacttcacaatggtaccgctgacctaagcttca

SEQ ID NO: 33522 - DNA, 33 bp, Homo sapiens
atagctcctacacagaaaatcaaattttagggc

SEQ ID NO: 33523 - DNA, 33 bp, Homo sapiens
aaaaccaaaggcaaagaacggcctcctgagacc

SEQ ID NO: 33524 - DNA, 33 bp, Homo sapiens
ctgtgcatggtgaacaatcattgcggaaaccca

SEQ ID NO: 33525 - DNA, 33 bp, Homo sapiens
atttcccctacggtaacggttggcttattgtgg

SEQ ID NO: 33526 - DNA, 33 bp, Homo sapiens
tgcaaagtgctatcaacgtattatggttaacat

SEQ ID NO: 33527 - DNA, 33 bp, Homo sapiens
gcaggatctctaccacaccagctgagggagggt

SEQ ID NO: 33528 - DNA, 33 bp, Homo sapiens
attgattgcctgtaataagggcttctgaaatat

SEQ ID NO: 33529 - DNA, 33 bp, Homo sapiens
aacactcaggttctaactcaggatctgtatcct

SEQ ID NO: 33530 - DNA, 51 bp, Homo sapiens
tggctaactggagggtgagcatctacggcctctcattagaccaggaaaaga

SEQ ID NO: 33531 - DNA, 33 bp, Homo sapiens
tttattcattttataacactttgtagctttcac

SEQ ID NO: 33532 - DNA, 33 bp, Homo sapiens
ttgcactgactcagacggatttacttccagatg

SEQ ID NO: 33533 - DNA, 33 bp, Homo sapiens
cctgcatgttcaaaaacgagggaatagtgccag

SEQ ID NO: 33534 - DNA, 33 bp, Homo sapiens
tattttctgagcactacctatgaggatcagaag

SEQ ID NO: 33535 - DNA, 33 bp, Homo sapiens
acaagccaggccagctaactatagcacagaatg

SEQ ID NO: 33536 - DNA, 51 bp, Homo sapiens
agaatcactcttttccttaaaatacggcacaaaattctagtctttattatc

SEQ ID NO: 33537 - DNA, 33 bp, Homo sapiens
cacacaaaagcataacaataacaacaacaataa

SEQ ID NO: 33538 - DNA, 33 bp, Homo sapiens
ccactatttgaaatgacgattatttcaagtcct

SEQ ID NO: 33539 - DNA, 33 bp, Homo sapiens
gctctagcggcaccaaatgggctctgcgttgta

SEQ ID NO: 33540 - DNA, 33 bp, Homo sapiens
ggcagcctcatcacaactgagcgttctgtctac

SEQ ID NO: 33541 - DNA, 33 bp, Homo sapiens
gggatttgctggctcacgtaatggttaagttca

SEQ ID NO: 33542 - DNA, 33 bp, Homo sapiens
tcaaccatccttcctaactaatatccactgtcc

SEQ ID NO: 33543 - DNA, 33 bp, Homo sapiens
agggacaaaattcaaccctcaacaagaggacag

SEQ ID NO: 33544 - DNA, 33 bp, Homo sapiens
tctatgtatgtatgaacgtggaaacacacatgg

SEQ ID NO: 33545 - DNA, 33 bp, Homo sapiens
gaagtgtttggtggcaacagatgctcaagacag

SEQ ID NO: 33546 - DNA, 33 bp, Homo sapiens
tccctttccataaaccaggagatttcaccacaa

SEQ ID NO: 33547 - DNA, 51 bp, Homo sapiens
aaggaattaagcttaatgtctttaaaatgagtatataaaggagcaaaaaga

SEQ ID NO: 33548 - DNA, 33 bp, Homo sapiens
tcatgaaattcttaaacattcctgtcaccccaa

SEQ ID NO: 33549 - DNA, 51 bp, Homo sapiens
ggtggcactgcggatatttttacacaggataatgtgacctgcccagcctgc

SEQ ID NO: 33550 - DNA, 33 bp, Homo sapiens
ggcactggcttccataaatacatgctacaagat

SEQ ID NO: 33551 - DNA, 33 bp, Homo sapiens
catcttacaccttctacaccactttaagccagc

SEQ ID NO: 33552 - DNA, 33 bp, Homo sapiens
cagaaatgacagagaacgatctcgctacaccca

SEQ ID NO: 33553 - DNA, 33 bp, Homo sapiens
attgatcgttttaacacgaatgatgaggtggcg

SEQ ID NO: 33554 - DNA, 33 bp, Homo sapiens
gcctatctggggtcccagcaggttttgaagatg

SEQ ID NO: 33555 - DNA, 33 bp, Homo sapiens
atccaaagataaagaccgatgtatgtggatgtt

SEQ ID NO: 33556 - DNA, 33 bp, Homo sapiens
ggtacattcaggctaacggaaaaatcctacata

SEQ ID NO: 33557 - DNA, 33 bp, Homo sapiens
tatgaagtgagcacaaactgtttgaaaacggga

SEQ ID NO: 33558 - DNA, 33 bp, Homo sapiens
aggattttagtcatgacacggtaaacataccaa

SEQ ID NO: 33559 - DNA, 33 bp, Homo sapiens
agcatccaggcactgaaaggatgactaagtttc

SEQ ID NO: 33560 - DNA, 33 bp, Homo sapiens
ctagatactatgacaaacaaggtaaatctcttt

SEQ ID NO: 33561 - DNA, 33 bp, Homo sapiens
cactgtgtgtagacataaacttgcacagtcttt

SEQ ID NO: 33562 - DNA, 33 bp, Homo sapiens
tccacacatttttcataagaaaccaagactaag

SEQ ID NO: 33563 - DNA, 33 bp, Homo sapiens
aggttttattggtaacagccaacagctggaaat

SEQ ID NO: 33564 - DNA, 33 bp, Homo sapiens
actggcaaacctggaacgtcaggagacaacata

SEQ ID NO: 33565 - DNA, 33 bp, Homo sapiens
ttctcacaggagctcaaatcctcttgtgaactg

SEQ ID NO: 33566 - DNA, 33 bp, Homo sapiens
ccccattcacgggccacgttccaatcggcttac

SEQ ID NO: 33567 - DNA, 33 bp, Homo sapiens
tgacttccatcgtctacgaagcccattccatgc

SEQ ID NO: 33568 - DNA, 33 bp, Homo sapiens
ctgttattcagcctaccaagtccactagaatta

SEQ ID NO: 33569 - DNA, 33 bp, Homo sapiens
aatcagaatgggtttacgtaagtgattttctag

SEQ ID NO: 33570 - DNA, 33 bp, Homo sapiens
cgagctctgtcttaaacctttgctcagctttac

SEQ ID NO: 33571 - DNA, 33 bp, Homo sapiens
gtgggagcaaagagaacggaaacatggacctgg

SEQ ID NO: 33572 - DNA, 33 bp, Homo sapiens
caaggagcacctgccaaagaacgagccactgag

SEQ ID NO: 33573 - DNA, 33 bp, Homo sapiens
tgacacctgaaatcgccccaacagccctaggag

SEQ ID NO: 33574 - DNA, 33 bp, Homo sapiens
aatctctcctcactaaatcacaactttgataaa

SEQ ID NO: 33575 - DNA, 33 bp, Homo sapiens
aaacccattcactagcaaaaactgactcaggct

SEQ ID NO: 33576 - DNA, 33 bp, Homo sapiens
acgcgtaagaaccacacaggccgggcctgccag

SEQ ID NO: 33577 - DNA, 33 bp, Homo sapiens
acaaagtgtcaatcaacgttttcttcaataatg

SEQ ID NO: 33578 - DNA, 33 bp, Homo sapiens
gaaaccctttgtaacagcagtctcaggtccgca

SEQ ID NO: 33579 - DNA, 33 bp, Homo sapiens
tcaactgctgcagggaaatgagttacaagggtc

SEQ ID NO: 33580 - DNA, 33 bp, Homo sapiens
ggggggtatctcagtcaaagattatgggctgga

SEQ ID NO: 33581 - DNA, 33 bp, Homo sapiens
tgtatgtgagggtttaagtctgtactctcttct

SEQ ID NO: 33582 - DNA, 33 bp, Homo sapiens
ttctgttgccgtgttcaagagtttggctgtcag

SEQ ID NO: 33583 - DNA, 33 bp, Homo sapiens
atgtgcagggacgtaaaggagcttcaaagtgca

SEQ ID NO: 33584 - DNA, 33 bp, Homo sapiens
agaggcttaaacaagacaggctgaaggccgctt

SEQ ID NO: 33585 - DNA, 33 bp, Homo sapiens
cctagttagatgtgcacgggcaaacgctaccat

SEQ ID NO: 33586 - DNA, 33 bp, Homo sapiens
gggatttggcaaatataagcaaatgttttttga

SEQ ID NO: 33587 - DNA, 33 bp, Homo sapiens
ctttggagccagacaacgtgacctaagcgttga

SEQ ID NO: 33588 - DNA, 33 bp, Homo sapiens
ggcgagaagactgattcaagaatgtttagaaag

SEQ ID NO: 33589 - DNA, 33 bp, Homo sapiens
tgtagggataaggccgaactgacaataacagag

SEQ ID NO: 33590 - DNA, 33 bp, Homo sapiens
acacctgttcaaactaccggcaagacactaatc

SEQ ID NO: 33591 - DNA, 33 bp, Homo sapiens
gagaaatctgaaactgaagcatctatgttgttc

SEQ ID NO: 33592 - DNA, 33 bp, Homo sapiens
ctgggtgctgaactacagggcacaagaatagga

SEQ ID NO: 33593 - DNA, 33 bp, Homo sapiens
gacttctgaggctaaagatgtataagcagtctt

SEQ ID NO: 33594 - DNA, 33 bp, Homo sapiens
ttatggagctctacaaatcactgcagcgtggaa

SEQ ID NO: 33595 - DNA, 33 bp, Homo sapiens
cctactttattctgacaaagtatgtacaagcta

SEQ ID NO: 33596 - DNA, 33 bp, Homo sapiens
agaccagttgtttggcagaatgtccttcagtct

SEQ ID NO: 33597 - DNA, 33 bp, Homo sapiens
ggcttgaagcaccagaaaagtgagtcgtccacc

SEQ ID NO: 33598 - DNA, 33 bp, Homo sapiens
cattgggaactctaagaagactgaacaggaaga

SEQ ID NO: 33599 - DNA, 33 bp, Homo sapiens
aactgcaggctcagaaagggcacaggtgcttct

SEQ ID NO: 33600 - DNA, 33 bp, Homo sapiens
aaaacaaaactatgcacgtggttcctgtaaact

SEQ ID NO: 33601 - DNA, 33 bp, Homo sapiens
cactccccaaagtggacgcacaaactcccgctc

SEQ ID NO: 33602 - DNA, 33 bp, Homo sapiens
acattcaaaatggaaacgcaaagtcccaagtgc

SEQ ID NO: 33603 - DNA, 33 bp, Homo sapiens
tgctaggagtgggcaccggtcagtattatatgc

SEQ ID NO: 33604 - DNA, 33 bp, Homo sapiens
catttcatactctgacagctttgaaaatttggt

SEQ ID NO: 33605 - DNA, 33 bp, Homo sapiens
gagtgtattaccctgacggcaatgctgtgcaag

SEQ ID NO: 33606 - DNA, 33 bp, Homo sapiens
cagcctgatgggcttacgcgtgcagggggacac

SEQ ID NO: 33607 - DNA, 33 bp, Homo sapiens
aaaggtgctgatgaacccaggtaaacgcactga

SEQ ID NO: 33608 - DNA, 33 bp, Homo sapiens
ctggggactcgagggacgatctggctgtcacca

SEQ ID NO: 33609 - DNA, 33 bp, Homo sapiens
tccggcagctaaccaaagcaatgctgttttgtt

SEQ ID NO: 33610 - DNA, 33 bp, Homo sapiens
tgtgtgctggctccatcaaaagtgcagctcatg

SEQ ID NO: 33611 - DNA, 33 bp, Homo sapiens
ttcttgctgtatgcaccacctgggccgactcct

SEQ ID NO: 33612 - DNA, 33 bp, Homo sapiens
ttcaggtatgtatgatcaaggctccagctgcat

SEQ ID NO: 33613 - DNA, 33 bp, Homo sapiens
cctcatctgcagcgtgccaatcagttcatagtg

SEQ ID NO: 33614 - DNA, 33 bp, Homo sapiens
ttgcagtgagctgatactacactactgcactcc

SEQ ID NO: 33615 - DNA, 33 bp, Homo sapiens
gacaactagaagacacagatggcctggaagccc

SEQ ID NO: 33616 - DNA, 33 bp, Homo sapiens
ctatgtttcattgttgaaatgtttggtttgagc

SEQ ID NO: 33617 - DNA, 33 bp, Homo sapiens
ctaaaattaacacctgaacaaattagaattaat

SEQ ID NO: 33618 - DNA, 33 bp, Homo sapiens
agccatcttctttccacaccatatttacgaaca

SEQ ID NO: 33619 - DNA, 33 bp, Homo sapiens
aggaaaataaccaagacaattaaaagctaaaat

SEQ ID NO: 33620 - DNA, 33 bp, Homo sapiens
tgctttggccccatcaataacttctgtgtttct

SEQ ID NO: 33621 - DNA, 33 bp, Homo sapiens
tgtggtgaaactatacaggctattggacagtag

SEQ ID NO: 33622 - DNA, 33 bp, Homo sapiens
attgacagaccttaagaaagcaagatgaaccca

SEQ ID NO: 33623 - DNA, 33 bp, Homo sapiens
tgagtagtattcgaccacaaagatatgacacaa

SEQ ID NO: 33624 - DNA, 33 bp, Homo sapiens
tcactttttataaacagctactgaccaggtgcg

SEQ ID NO: 33625 - DNA, 33 bp, Homo sapiens
gtgttcagccctcgaccccaagcgcctggtaga

SEQ ID NO: 33626 - DNA, 33 bp, Homo sapiens
cccttaaactacgtcacggatgttaaggagaaa

SEQ ID NO: 33627 - DNA, 33 bp, Homo sapiens
ttacaacagttcttaacctatggagagatattt

SEQ ID NO: 33628 - DNA, 33 bp, Homo sapiens
acttcttttaaaaaaacgtatcctgtcatcaca

SEQ ID NO: 33629 - DNA, 33 bp, Homo sapiens
tttcaatcacaccaagaccaaaatcagcactct

SEQ ID NO: 33630 - DNA, 33 bp, Homo sapiens
gttgtccattttctgaactcgcgattgttttga

SEQ ID NO: 33631 - DNA, 33 bp, Homo sapiens
aagtgtactcgcttcacaggcacatataataat

SEQ ID NO: 33632 - DNA, 33 bp, Homo sapiens
ctagtgcatcattgaacgaaaggaatttcacac

SEQ ID NO: 33633 - DNA, 33 bp, Homo sapiens
ttattattttctgctacgtctaataccaatatt

SEQ ID NO: 33634 - DNA, 33 bp, Homo sapiens
agtaaaaggcattaggcacctggagagcactgc

SEQ ID NO: 33635 - DNA, 33 bp, Homo sapiens
cacgtctgagtaaactaagaaatctgaaggtag

SEQ ID NO: 33636 - DNA, 33 bp, Homo sapiens
tactgaatgtaatttaacacttatggcaggaag

SEQ ID NO: 33637 - DNA, 33 bp, Homo sapiens
catgttcaaacattaccgggaaaaatcaataat

SEQ ID NO: 33638 - DNA, 33 bp, Homo sapiens
ccatttattagtttaactgaagatacaagagat

SEQ ID NO: 33639 - DNA, 33 bp, Homo sapiens
gactatgaaaaataaaaatagctatcgtccatg

SEQ ID NO: 33640 - DNA, 33 bp, Homo sapiens
acgtctactagtcccacagaaattaaaagttaa

SEQ ID NO: 33641 - DNA, 33 bp, Homo sapiens
gttgttctatttttcacgtgagaggatggactc

SEQ ID NO: 33642 - DNA, 33 bp, Homo sapiens
tggatgtctcagaagaacacagaaaaatgtggg

SEQ ID NO: 33643 - DNA, 33 bp, Homo sapiens
aatttaccctgcctcaaaaagatagtcgagagg

SEQ ID NO: 33644 - DNA, 33 bp, Homo sapiens
ttgttcttaagcatcagaattggttttaagaac

SEQ ID NO: 33645 - DNA, 33 bp, Homo sapiens
cctgacctctgaggaactgaatgccagggtaag

SEQ ID NO: 33646 - DNA, 33 bp, Homo sapiens
ctttgctgcttcttgaacgtttttggatcttca

SEQ ID NO: 33647 - DNA, 33 bp, Homo sapiens
atacattatttccctacaccaatgaccagaaga

SEQ ID NO: 33648 - DNA, 33 bp, Homo sapiens
gctgcacctatacaaaacctatgactcaatatt

SEQ ID NO: 33649 - DNA, 33 bp, Homo sapiens
atgccttcatatgacaatagttcaattccccac

SEQ ID NO: 33650 - DNA, 33 bp, Homo sapiens
tgaattagccaaagagcaagatatttttcttta

SEQ ID NO: 33651 - DNA, 33 bp, Homo sapiens
ggcaacgtaattgcaacatgacagcaggcaaaa

SEQ ID NO: 33652 - DNA, 33 bp, Homo sapiens
tctggctaaacgtacaacactgaatcatctaat

SEQ ID NO: 33653 - DNA, 33 bp, Homo sapiens
tgaagaaattgccttacatgatagtacatgaac

SEQ ID NO: 33654 - DNA, 33 bp, Homo sapiens
gcatggggtagctaagcataaaagatatagcca

SEQ ID NO: 33655 - DNA, 33 bp, Homo sapiens
taatttcagtggtttcaaaattgttgagacttt

SEQ ID NO: 33656 - DNA, 33 bp, Homo sapiens
tactccttggttgaaacagttacctcaattctg

SEQ ID NO: 33657 - DNA, 33 bp, Homo sapiens
atttatacatgaaggacaatcagtctaccataa

SEQ ID NO: 33658 - DNA, 51 bp, Homo sapiens
taggaggagagaaaataaaagacaaatagcgtaagagaaacagctttgttg

SEQ ID NO: 33659 - DNA, 33 bp, Homo sapiens
caagattgatgtggaaaaactcagcatggtttt

SEQ ID NO: 33660 - DNA, 51 bp, Homo sapiens
ctagtcagacgttaatttgaaccacacacagtctaagtctagaacttgtgt

SEQ ID NO: 33661 - DNA, 33 bp, Homo sapiens
tgttgagttgggtcgagagattacattagtgtc

SEQ ID NO: 33662 - DNA, 33 bp, Homo sapiens
tgatagacaagcctcaagtgctacacattcatt

SEQ ID NO: 33663 - DNA, 33 bp, Homo sapiens
gtgattgatggtagaactgttgctgtagggcat

SEQ ID NO: 33664 - DNA, 33 bp, Homo sapiens
tttgtaaatgcaaggacgtttataagtcaggca

SEQ ID NO: 33665 - DNA, 33 bp, Homo sapiens
tgtttgtggttgaggaaaatccaaatgtataat

SEQ ID NO: 33666 - DNA, 33 bp, Homo sapiens
gagaaattcttcagatcaaataacagaatcatg

SEQ ID NO: 33667 - DNA, 33 bp, Homo sapiens
ctacaatagcaggaaaagttagaagcaccttaa

SEQ ID NO: 33668 - DNA, 51 bp, Homo sapiens
gaacagtcttctccacagtctctcacgcttcctagtcccaatcaaaagctt

SEQ ID NO: 33669 - DNA, 33 bp, Homo sapiens
caatatttggagagaactgaagctaagtgcttg

SEQ ID NO: 33670 - DNA, 33 bp, Homo sapiens
gttggtccttggtagacaatattccacggagat

SEQ ID NO: 33671 - DNA, 33 bp, Homo sapiens
tggttttcccctgatcaatttcagttgtcttca

SEQ ID NO: 33672 - DNA, 33 bp, Homo sapiens
gaatgaacaaagcttacaggatctatggaacaa

SEQ ID NO: 33673 - DNA, 33 bp, Homo sapiens
gggagaggttggtcaaaaagtatgaactttcag

SEQ ID NO: 33674 - DNA, 51 bp, Homo sapiens
attcaacagttgacagttaaaattacgaagccaatgttccaaaatattaaa

SEQ ID NO: 33675 - DNA, 33 bp, Homo sapiens
aacagactttggcaccagctaggtaaacctatc

SEQ ID NO: 33676 - DNA, 33 bp, Homo sapiens
cagaaatggtagagaacgtcaatacagaaaaga

SEQ ID NO: 33677 - DNA, 33 bp, Homo sapiens
tcttaattctcataagcatttgtattctcaacc

SEQ ID NO: 33678 - DNA, 33 bp, Homo sapiens
gattgaaatttagaagaatcttggaagtctttg

SEQ ID NO: 33679 - DNA, 33 bp, Homo sapiens
cagatgtgagctaaaaatcgtgacctaatgaca

SEQ ID NO: 33680 - DNA, 33 bp, Homo sapiens
tttcaggtgatagttacaaccagcctctcgaaa

SEQ ID NO: 33681 - DNA, 51 bp, Homo sapiens
ccccatgacactgtacacacgaatgaacttgttagttaaatgaattataaa

SEQ ID NO: 33682 - DNA, 51 bp, Homo sapiens
tgttgtcattcaaagggcataagcaaatgtcaaataattgaatcattgaga

SEQ ID NO: 33683 - DNA, 33 bp, Homo sapiens
cccagcagagattcttaaaacttactctctcat

SEQ ID NO: 33684 - DNA, 33 bp, Homo sapiens
tgaatggcagtgctaaaacagctataacacaag

SEQ ID NO: 33685 - DNA, 33 bp, Homo sapiens
gtactagagctggtaaacaacagaggagtacag

SEQ ID NO: 33686 - DNA, 33 bp, Homo sapiens
tttctgccaaaatgtacaatagagccttgcaat

SEQ ID NO: 33687 - DNA, 51 bp, Homo sapiens
tgccctgtagaaagccaagcccaaacgctataactccttccaaataattgc

SEQ ID NO: 33688 - DNA, 33 bp, Homo sapiens
atatcataccattgacacataaaagcaggtgtt

SEQ ID NO: 33689 - DNA, 33 bp, Homo sapiens
acgttggccatctttcaagacattataaaacat

SEQ ID NO: 33690 - DNA, 33 bp, Homo sapiens
gctttcagacatcttccagaagcgtgtgcatct

SEQ ID NO: 33691 - DNA, 33 bp, Homo sapiens
ttaattatgtctctggaatagaagctatattca

SEQ ID NO: 33692 - DNA, 33 bp, Homo sapiens
cacacacttgattttacgcagttcagcagcaag

SEQ ID NO: 33693 - DNA, 33 bp, Homo sapiens
ggatgttggacactgacaatgcaaaggcagggt

SEQ ID NO: 33694 - DNA, 33 bp, Homo sapiens
tggtgactagctcaaaagaaaaggcagagagag

SEQ ID NO: 33695 - DNA, 51 bp, Homo sapiens
ggaaataattcttggataataacaaattggacctctgaaatgaataagagg

SEQ ID NO: 33696 - DNA, 33 bp, Homo sapiens
ctttcaggaaactagaacttgctcttctactcc

SEQ ID NO: 33697 - DNA, 51 bp, Homo sapiens
atcatattccagaataagatacatgcattcctttcaacagggtacacattt

SEQ ID NO: 33698 - DNA, 33 bp, Homo sapiens
tgacaggctcaaaatcaaatagacatatctttt

SEQ ID NO: 33699 - DNA, 33 bp, Homo sapiens
aaaaacttcctgtccaaagagaacttactttct

SEQ ID NO: 33700 - DNA, 33 bp, Homo sapiens
gtggcttaaacaccaaacatcagattaattcat

SEQ ID NO: 33701 - DNA, 33 bp, Homo sapiens
ataataaatagtgaaacaataagctgatgtcag

SEQ ID NO: 33702 - DNA, 33 bp, Homo sapiens
tgcagtatttcaaaaactgacaggtttaaagta

SEQ ID NO: 33703 - DNA, 33 bp, Homo sapiens
ttagaagacacctggactataaaaataaagatt

SEQ ID NO: 33704 - DNA, 51 bp, Homo sapiens
aaatctccaatcaagaatacttcaccatttaatgtgttttataacactgga

SEQ ID NO: 33705 - DNA, 33 bp, Homo sapiens
attaaaaggcagacaaaattgccgcatgataca

SEQ ID NO: 33706 - DNA, 33 bp, Homo sapiens
cttggagaataatgaaaaaagcagctttatatc

SEQ ID NO: 33707 - DNA, 33 bp, Homo sapiens
aacaacagcacataggaacttttattatattat

SEQ ID NO: 33708 - DNA, 33 bp, Homo sapiens
caatgctacaaacatccgaatagcacatttttt

SEQ ID NO: 33709 - DNA, 33 bp, Homo sapiens
ttagtacactgtaaaaagctttctgtctgagta

SEQ ID NO: 33710 - DNA, 33 bp, Homo sapiens
agtgatgaataaaggaccacaggtgtaaaacag

SEQ ID NO: 33711 - DNA, 33 bp, Homo sapiens
aacgcaatgattatgaccggaggcagcagttga

SEQ ID NO: 33712 - DNA, 33 bp, Homo sapiens
agtcatctttctgctccacgtggcatgacaaga

SEQ ID NO: 33713 - DNA, 33 bp, Homo sapiens
ggcagcggtgagatacaacgatctgcctcacta

SEQ ID NO: 33714 - DNA, 33 bp, Homo sapiens
agctaagaaagcagccaattcataaaaatgcat

SEQ ID NO: 33715 - DNA, 33 bp, Homo sapiens
aaatggcctggaattacatggtattactgcata

SEQ ID NO: 33716 - DNA, 33 bp, Homo sapiens
gagtgtatctctttgacgttgtgctggatataa

SEQ ID NO: 33717 - DNA, 33 bp, Homo sapiens
aagtgcatataaaacactgaaatctgaataagg

SEQ ID NO: 33718 - DNA, 33 bp, Homo sapiens
ggcagaagacttcacgacggttccaaaggccac

SEQ ID NO: 33719 - DNA, 51 bp, Homo sapiens
tcatgtgggtaagccctgaataaccgacatttctttaagctatcagcacca

SEQ ID NO: 33720 - DNA, 33 bp, Homo sapiens
atatatgcttgatctcacaacttcaccattccc

SEQ ID NO: 33721 - DNA, 33 bp, Homo sapiens
tcctgttatgttttcactagtaaagactgataa

SEQ ID NO: 33722 - DNA, 33 bp, Homo sapiens
atgtcaacttggtattcaaactgtaagcatcaa

SEQ ID NO: 33723 - DNA, 33 bp, Homo sapiens
taacaatagaaaagcgaatagcactctggcacc

SEQ ID NO: 33724 - DNA, 33 bp, Homo sapiens
aaagcatggatcataacagtttctatttcatag

SEQ ID NO: 33725 - DNA, 33 bp, Homo sapiens
aatgcagatatccatccgagacccttcagaaac

SEQ ID NO: 33726 - DNA, 33 bp, Homo sapiens
tgatgaaggactaggaccaattcatggaaattc

SEQ ID NO: 33727 - DNA, 33 bp, Homo sapiens
aaagcaagtcaggcaaccaaatcaaggagaagg

SEQ ID NO: 33728 - DNA, 33 bp, Homo sapiens
aactcttctgaatctgaagggagccttgaaaac

SEQ ID NO: 33729 - DNA, 33 bp, Homo sapiens
atatgtttttagttgacctgactcagtttccca

SEQ ID NO: 33730 - DNA, 33 bp, Homo sapiens
caaaaagacacagaaggaggtaatagaaactca

SEQ ID NO: 33731 - DNA, 33 bp, Homo sapiens
tttaatataaattaacactaggctgtaatctgt

SEQ ID NO: 33732 - DNA, 51 bp, Homo sapiens
tgttcgttttaattttttctcagcgcccgtcatttggtttacttcatttca

SEQ ID NO: 33733 - DNA, 51 bp, Homo sapiens
ggtacactgaggaaaataatacttacggctgattgtctgaagaacaaggtg

SEQ ID NO: 33734 - DNA, 51 bp, Homo sapiens
gagtgcagaaacatgagtgtttgcgacagccagctagctagattctatgtc

SEQ ID NO: 33735 - DNA, 33 bp, Homo sapiens
ttgttgcttatccttgcagtccaattcgtatac

SEQ ID NO: 33736 - DNA, 51 bp, Homo sapiens
gaaaaaagtcatcattatgttaaaaacacatcatcattattaaacatgtca

SEQ ID NO: 33737 - DNA, 33 bp, Homo sapiens
agttaacatctgttgacaaagcagtcgctagat

SEQ ID NO: 33738 - DNA, 33 bp, Homo sapiens
ggaactggcttccacacgagtaagcataaaagt

SEQ ID NO: 33739 - DNA, 33 bp, Homo sapiens
gaatggggcacctcagaagtcatctttggatca

SEQ ID NO: 33740 - DNA, 33 bp, Homo sapiens
tttagacccaaaggccatagttataaaagattc

SEQ ID NO: 33741 - DNA, 51 bp, Homo sapiens
gtgcccaataattgggaattgggtaaacagttcttaggagtcagtccagac

SEQ ID NO: 33742 - DNA, 33 bp, Homo sapiens
tcaaaagattaaatgacacaactgtttgctaga

SEQ ID NO: 33743 - DNA, 33 bp, Homo sapiens
catctcaccttttgcaatgaaaaaacacaacgg

SEQ ID NO: 33744 - DNA, 33 bp, Homo sapiens
atggacgtgtgattcaatcctggctagtgtaat

SEQ ID NO: 33745 - DNA, 33 bp, Homo sapiens
aattgaagtcactccaaagcaagatgtttccaa

SEQ ID NO: 33746 - DNA, 51 bp, Homo sapiens
ggaatctgagctctatcatagttcacatgtatgacttctgctttaccacac

SEQ ID NO: 33747 - DNA, 51 bp, Homo sapiens
cctattagtcatagtatacacagtaataatagccaaaatttattgcgtgtt

SEQ ID NO: 33748 - DNA, 51 bp, Homo sapiens
aaagtatccagtccagcctctaacacgcaataaattttggctattattact

SEQ ID NO: 33749 - DNA, 33 bp, Homo sapiens
tctttattcttgtgcaaggtgggctcatagaga

SEQ ID NO: 33750 - DNA, 33 bp, Homo sapiens
tttgttgaggacctaacacatgctggatactgt

SEQ ID NO: 33751 - DNA, 33 bp, Homo sapiens
cgctcagagagaatagaagttcacttgtgaata

SEQ ID NO: 33752 - DNA, 33 bp, Homo sapiens
tagcaaagaagaaagaagtgagagactgaaagc

SEQ ID NO: 33753 - DNA, 33 bp, Homo sapiens
ctcactaatagtgtgaacctggataaagctacc

SEQ ID NO: 33754 - DNA, 33 bp, Homo sapiens
gattgagaaactttaagcccagggaaggactat

SEQ ID NO: 33755 - DNA, 51 bp, Homo sapiens
gtcactaaaagaaaatgattattacagagttcaagaaaaattattcaaaag

SEQ ID NO: 33756 - DNA, 33 bp, Homo sapiens
tctggcaacagaattacgtgagatgctgtattt

SEQ ID NO: 33757 - DNA, 33 bp, Homo sapiens
ggttgtcatttgttcgcaagtacggcagagcct

SEQ ID NO: 33758 - DNA, 33 bp, Homo sapiens
tgttctgttctataccacgaggcacaatattgt

SEQ ID NO: 33759 - DNA, 33 bp, Homo sapiens
tagtatcttccacatccatcactgaggctaccg

SEQ ID NO: 33760 - DNA, 33 bp, Homo sapiens
actggtgtaggcatcaaacatgtaaatgaatct

SEQ ID NO: 33761 - DNA, 33 bp, Homo sapiens
aaatacctcgaagaaaacacagattattggaag

SEQ ID NO: 33762 - DNA, 33 bp, Homo sapiens
aacagaaaccattataagtacccaaagcagaat

SEQ ID NO: 33763 - DNA, 33 bp, Homo sapiens
ctcagaaagaattgacgcaaatgacagcctcac

SEQ ID NO: 33764 - DNA, 33 bp, Homo sapiens
tgtcatcactcaaatggattaagtgcttgttgg

SEQ ID NO: 33765 - DNA, 33 bp, Homo sapiens
gagtaaacgtcatgggccagactcgaattacta

SEQ ID NO: 33766 - DNA, 33 bp, Homo sapiens
ggaaaggcaagaaaaacctgagaaattgttata

SEQ ID NO: 33767 - DNA, 33 bp, Homo sapiens
catgaatggctggacacagagtaagaggattga

SEQ ID NO: 33768 - DNA, 33 bp, Homo sapiens
taactgaagtaagtagaaggttgtagtagccca

SEQ ID NO: 33769 - DNA, 51 bp, Homo sapiens
aatggggatagtaactccctcttaaatgagacagtgatcttaaagagcaga

SEQ ID NO: 33770 - DNA, 51 bp, Homo sapiens
gctaggtactattgactatctaagaagattacacccacgtccatatctgta

SEQ ID NO: 33771 - DNA, 33 bp, Homo sapiens
gcaatgtactaaggtaagcaagttgattctgca

SEQ ID NO: 33772 - DNA, 33 bp, Homo sapiens
cccactgcagtgcataaggttatttatctgaca

SEQ ID NO: 33773 - DNA, 33 bp, Homo sapiens
tatgacactgaattaacagccattagaggtgaa

SEQ ID NO: 33774 - DNA, 33 bp, Homo sapiens
tgacttgttgtgtatccctggtcttcctgttac

SEQ ID NO: 33775 - DNA, 33 bp, Homo sapiens
gaaggacttgaatcaccgggacgtcacccaggt

SEQ ID NO: 33776 - DNA, 51 bp, Homo sapiens
tccacaccagtctttaaaattgaaacgatacatcctcatatcaagcctgaa

SEQ ID NO: 33777 - DNA, 33 bp, Homo sapiens
tgcatttgaatgttgacagttcttaccaaattt

SEQ ID NO: 33778 - DNA, 33 bp, Homo sapiens
tcttgtgtagcttttgcagatgttgctcagcct

SEQ ID NO: 33779 - DNA, 33 bp, Homo sapiens
gcactccacaatcacacacttatacagctccgc

SEQ ID NO: 33780 - DNA, 33 bp, Homo sapiens
tctaaacactgagctgaaattgagacattggac

SEQ ID NO: 33781 - DNA, 51 bp, Homo sapiens
ttctctgaaaagtctgacagagcgaactttacctctttctattcctccatt

SEQ ID NO: 33782 - DNA, 33 bp, Homo sapiens
aaagcacaaacactgacagctgtaaggtaaagt

SEQ ID NO: 33783 - DNA, 33 bp, Homo sapiens
tggacaatttggagccagcatatacgcccatct

SEQ ID NO: 33784 - DNA, 33 bp, Homo sapiens
agcacaccatcgtatcacaatatccctgaattt

SEQ ID NO: 33785 - DNA, 33 bp, Homo sapiens
gtaactggcaacttcagccttccagctgcttag

SEQ ID NO: 33786 - DNA, 33 bp, Homo sapiens
gaagttgccagttactaagacagggagaatgtg

SEQ ID NO: 33787 - DNA, 33 bp, Homo sapiens
ggagtctggaccccaaagagtccaaggcagctg

SEQ ID NO: 33788 - DNA, 33 bp, Homo sapiens
catttgtcacaactccaaaagatgtgagaaagt

SEQ ID NO: 33789 - DNA, 33 bp, Homo sapiens
actctacaggaacagacgcatttggtacaaata

SEQ ID NO: 33790 - DNA, 33 bp, Homo sapiens
tttaaaaggccagctggatgtttgcacatcagt

SEQ ID NO: 33791 - DNA, 33 bp, Homo sapiens
agctaaacacactagacgcttttgttacactaa

SEQ ID NO: 33792 - DNA, 51 bp, Homo sapiens
gagttgaactaagcagaataaaacaactttaccacaataataattgcaaca

SEQ ID NO: 33793 - DNA, 33 bp, Homo sapiens
ggagtgctttctcaggaaaccaaaatgtagctg

SEQ ID NO: 33794 - DNA, 33 bp, Homo sapiens
aaagtgtctagaacaaaggtctcaaactgatag

SEQ ID NO: 33795 - DNA, 33 bp, Homo sapiens
agtaagaaagatcaagcccagacactgtgactc

SEQ ID NO: 33796 - DNA, 33 bp, Homo sapiens
ggtgcactgatttccccggaggagccctgagag

SEQ ID NO: 33797 - DNA, 33 bp, Homo sapiens
tatggagaggtagatgacataatatatttgcaa

SEQ ID NO: 33798 - DNA, 33 bp, Homo sapiens
ggtgctggaatcagaccgaaccgttggtttgaa

SEQ ID NO: 33799 - DNA, 33 bp, Homo sapiens
tctaaagtcttggaagcctcctgtattgccagc

SEQ ID NO: 33800 - DNA, 33 bp, Homo sapiens
catcaggttctcttccccactcgagaaaatcaa

SEQ ID NO: 33801 - DNA, 33 bp, Homo sapiens
aagagttacctgtttgaagtttggaatgtactt

SEQ ID NO: 33802 - DNA, 33 bp, Homo sapiens
aatttatggaagtcagaaaagagatggaatcat

SEQ ID NO: 33803 - DNA, 33 bp, Homo sapiens
ggtgacactcttcactcaatgaggaacagtgac

SEQ ID NO: 33804 - DNA, 33 bp, Homo sapiens
tctcatttttaaaggccctctttttagattgag

SEQ ID NO: 33805 - DNA, 33 bp, Homo sapiens
gccaagttacaggtaccacaaccattactgtgt

SEQ ID NO: 33806 - DNA, 33 bp, Homo sapiens
cagagcagaaaactgacaaaaactctggttaag

SEQ ID NO: 33807 - DNA, 51 bp, Homo sapiens
ctgggcagattggtcacaccaagaacgaaagggacgatatttttcttcccc

SEQ ID NO: 33808 - DNA, 51 bp, Homo sapiens
atagtagtttccattgtaataaatgcggacagactaggtattttggggact

SEQ ID NO: 33809 - DNA, 33 bp, Homo sapiens
aggctagtcggtcacaaagtgtcctctcatgac

SEQ ID NO: 33810 - DNA, 33 bp, Homo sapiens
ggaagcctttcctgaccgggtcaaacttctctc

SEQ ID NO: 33811 - DNA, 33 bp, Homo sapiens
aggctgtatacttcacaagcatatcttgcagcc

SEQ ID NO: 33812 - DNA, 33 bp, Homo sapiens
tgaagagtcaggtgacacattgggagagcagag

SEQ ID NO: 33813 - DNA, 33 bp, Homo sapiens
tttagattcaaaagtccatgtaagatttgggtc

SEQ ID NO: 33814 - DNA, 33 bp, Homo sapiens
cattatcagctcatggccattaaatgtttaaca

SEQ ID NO: 33815 - DNA, 33 bp, Homo sapiens
tttgtccctagctatccaccttgtgtgtacctt

SEQ ID NO: 33816 - DNA, 33 bp, Homo sapiens
ggtgttttaaatggaaactacttcagaaaataa

SEQ ID NO: 33817 - DNA, 33 bp, Homo sapiens
cagaacagcttcctccgctatataatcacgtgt

SEQ ID NO: 33818 - DNA, 33 bp, Homo sapiens
gctcccacagcattcaatacatttccagagttt

SEQ ID NO: 33819 - DNA, 33 bp, Homo sapiens
agtccacaaaggaagaccatttgcttgtgtgac

SEQ ID NO: 33820 - DNA, 33 bp, Homo sapiens
tagtcttcaaaccatagcatgcatcagaatcac

SEQ ID NO: 33821 - DNA, 51 bp, Homo sapiens
atttactctgctacataaaattctaaagatggaattgtgtactatgctctt

SEQ ID NO: 33822 - DNA, 33 bp, Homo sapiens
acaaacactggccttaactccaatatctgcgtt

SEQ ID NO: 33823 - DNA, 51 bp, Homo sapiens
agtagttagctacccagagaaatcaatactaggtacaactgcatgattgac

SEQ ID NO: 33824 - DNA, 33 bp, Homo sapiens
cttaatggtaccagacacatttcaaggaatttg

SEQ ID NO: 33825 - DNA, 33 bp, Homo sapiens
attgctcctagtattggacctcattttaagtga

SEQ ID NO: 33826 - DNA, 33 bp, Homo sapiens
acaggtaccctgatgacgctgaccagccgactt

SEQ ID NO: 33827 - DNA, 33 bp, Homo sapiens
ttatctcctagaatccaactttcaccccttctc

SEQ ID NO: 33828 - DNA, 33 bp, Homo sapiens
gttacagtggcctaaaagctatagtggtgtatg

SEQ ID NO: 33829 - DNA, 51 bp, Homo sapiens
tggatcaatgcacatgaacttttccaggcttttgatccatctccaactttt

SEQ ID NO: 33830 - DNA, 33 bp, Homo sapiens
catttcatcctctcatgaccttcaataataaca

SEQ ID NO: 33831 - DNA, 51 bp, Homo sapiens
gtcacaaggcagaagtggtcaaaagcagaatttaaaagaaccaaaacaaat

SEQ ID NO: 33832 - DNA, 33 bp, Homo sapiens
ttaaggaaactttctgaaagcatcactcaacac

SEQ ID NO: 33833 - DNA, 33 bp, Homo sapiens
ttttgctaaacctgcacgttctaaaagctgaat

SEQ ID NO: 33834 - DNA, 51 bp, Homo sapiens
ttttggttttgtagggggaaatggcacatttagacagtggtctcgggaact

SEQ ID NO: 33835 - DNA, 33 bp, Homo sapiens
aatggcagctaccaaagaacctatagcaaaaat

SEQ ID NO: 33836 - DNA, 33 bp, Homo sapiens
tatgtgtatccaaccaccgttcagaagtaagaa

SEQ ID NO: 33837 - DNA, 33 bp, Homo sapiens
aagccctggattccaacgtctttaacacaaatc

SEQ ID NO: 33838 - DNA, 33 bp, Homo sapiens
attttctctgggccaactcggagaaggctggct

SEQ ID NO: 33839 - DNA, 33 bp, Homo sapiens
gctgaaaatcactgacaaggtagaagaatagga

SEQ ID NO: 33840 - DNA, 33 bp, Homo sapiens
tcattgtagatatcaccgctgaggctgtctgtg

SEQ ID NO: 33841 - DNA, 33 bp, Homo sapiens
cccacagacagtgtagaaattggcagctttttt

SEQ ID NO: 33842 - DNA, 51 bp, Homo sapiens
tctcgtaacttcaaagagtctcaaaagtgtcaagatcctaagacaggaaac

SEQ ID NO: 33843 - DNA, 33 bp, Homo sapiens
taggagagtctggggacgcctctcaaggaatga

SEQ ID NO: 33844 - DNA, 33 bp, Homo sapiens
tcttaatctgccaaaacctggcactaatctggt

SEQ ID NO: 33845 - DNA, 33 bp, Homo sapiens
ataggtcttattgtccacgggattggttttgtc

SEQ ID NO: 33846 - DNA, 33 bp, Homo sapiens
acaagatgagcccctaaacgtatctaagaatgt

SEQ ID NO: 33847 - DNA, 33 bp, Homo sapiens
agcaccatatgctgaccaggcctgacccttctt

SEQ ID NO: 33848 - DNA, 33 bp, Homo sapiens
aaagggaggcgaggaacgcaagagctcagtgtc

SEQ ID NO: 33849 - DNA, 33 bp, Homo sapiens
gggcataaaagcagtacgtatctcagagggagt

SEQ ID NO: 33850 - DNA, 33 bp, Homo sapiens
gggtgactcaccatcacgggccctttgcattgt

SEQ ID NO: 33851 - DNA, 33 bp, Homo sapiens
gccctattgtctgaacactgttttgatgtagac

SEQ ID NO: 33852 - DNA, 33 bp, Homo sapiens
cactgtttgccggcaccagatttcacaggagtt

SEQ ID NO: 33853 - DNA, 33 bp, Homo sapiens
tgaaacttaggcagaaattatgaggcttgggct

SEQ ID NO: 33854 - DNA, 33 bp, Homo sapiens
cagcactcctcgttccagctcattggacagaac

SEQ ID NO: 33855 - DNA, 33 bp, Homo sapiens
tggtctgggatgtggacggagagcaaagaaatt

SEQ ID NO: 33856 - DNA, 33 bp, Homo sapiens
agaagggattggccacaaaaaggaaagcacagg

SEQ ID NO: 33857 - DNA, 33 bp, Homo sapiens
agttgcaaatagctcacggaagatgaagaatga

SEQ ID NO: 33858 - DNA, 33 bp, Homo sapiens
caccagacataattaacctgtgtaactggtact

SEQ ID NO: 33859 - DNA, 33 bp, Homo sapiens
cattaatgcatacccaataagtgcctgtcacct

SEQ ID NO: 33860 - DNA, 33 bp, Homo sapiens
cacagcacaggcctcacggaaccttcagtaata

SEQ ID NO: 33861 - DNA, 51 bp, Homo sapiens
aaacaataattatgagaataattatcacaaaaatgccttgacattgacaag

SEQ ID NO: 33862 - DNA, 51 bp, Homo sapiens
tattgtgaaatcacagaagtgttaacagccagttccttttttgatcatatg

SEQ ID NO: 33863 - DNA, 33 bp, Homo sapiens
taaatccctgaacccaatagtagggaccaaggt

SEQ ID NO: 33864 - DNA, 51 bp, Homo sapiens
tttattctttttattgagaagagttaggaaataaagttacttagacctttt

SEQ ID NO: 33865 - DNA, 33 bp, Homo sapiens
tacatgttgaacggacacaactttgtgattgac

SEQ ID NO: 33866 - DNA, 33 bp, Homo sapiens
gtagaagcagttgtcactccagacctcccagga

SEQ ID NO: 33867 - DNA, 33 bp, Homo sapiens
aaatacactaaagaaagacaggaaggtgagcaa

SEQ ID NO: 33868 - DNA, 33 bp, Homo sapiens
actccaaagcttggaccctttccagtgtcagaa

SEQ ID NO: 33869 - DNA, 33 bp, Homo sapiens
caagggcaagcagagacggatgtcccagtagag

SEQ ID NO: 33870 - DNA, 33 bp, Homo sapiens
tggcctgctcacagaacaaaggaggagcactct

SEQ ID NO: 33871 - DNA, 33 bp, Homo sapiens
tattggatcacaccacaagggcaggtaaagggt

SEQ ID NO: 33872 - DNA, 33 bp, Homo sapiens
cagtgttattccaaaacaggagatgaaatgaag

SEQ ID NO: 33873 - DNA, 33 bp, Homo sapiens
taagctgtgatgaagacgtccctgctacgctat

SEQ ID NO: 33874 - DNA, 33 bp, Homo sapiens
gaaaagggggatttcacgagctaacgaagtggt

SEQ ID NO: 33875 - DNA, 51 bp, Homo sapiens
agataaaccaggcttcctaactggaaatagaaaattggagcctgagattat

SEQ ID NO: 33876 - DNA, 33 bp, Homo sapiens
cttcttactcactttacgaatgggacacaatga

SEQ ID NO: 33877 - DNA, 51 bp, Homo sapiens
gatctgcaagttggcatcaggaaaagaaattctgtagtactctgtattaac

SEQ ID NO: 33878 - DNA, 33 bp, Homo sapiens
ctaaataccagatcaaccaagtggcttattaga

SEQ ID NO: 33879 - DNA, 51 bp, Homo sapiens
atagggtagaatattatatagtcataaaaaaatacctgtatcaaaaaatat

SEQ ID NO: 33880 - DNA, 33 bp, Homo sapiens
ccttcacacctctttcaacctcctctcttttgc

SEQ ID NO: 33881 - DNA, 33 bp, Homo sapiens
atttgggaatatctcaaccgttcaaatgccctg

SEQ ID NO: 33882 - DNA, 33 bp, Homo sapiens
gggaatccatctctatcgcatggcagccttacc

SEQ ID NO: 33883 - DNA, 33 bp, Homo sapiens
ttgttccctcatatcacagtagcaaacaggtca

SEQ ID NO: 33884 - DNA, 33 bp, Homo sapiens
atccagagtccactgaatcactttcctgtacag

SEQ ID NO: 33885 - DNA, 33 bp, Homo sapiens
aatacaaaaattcgagaatgcttaagtccctta

SEQ ID NO: 33886 - DNA, 33 bp, Homo sapiens
cagcaccatggggtccaccagatcatatgcctc

SEQ ID NO: 33887 - DNA, 33 bp, Homo sapiens
taacatcaagggactcaagtttccaaatgcagg

SEQ ID NO: 33888 - DNA, 33 bp, Homo sapiens
accgccttaatcatgacacatctagaagacctt

SEQ ID NO: 33889 - DNA, 33 bp, Homo sapiens
cgtgtgcctaattaacgcctagtcatccttcac

SEQ ID NO: 33890 - DNA, 33 bp, Homo sapiens
cttcttctagaacagaaatctgaccaagttagt

SEQ ID NO: 33891 - DNA, 33 bp, Homo sapiens
gcgtgggacttttagacaagtggctagaagtgc

SEQ ID NO: 33892 - DNA, 33 bp, Homo sapiens
agttccacggctaaaaagaattctgaaaatcac

SEQ ID NO: 33893 - DNA, 33 bp, Homo sapiens
atttcagaggcctggcaataaagcactggagaa

SEQ ID NO: 33894 - DNA, 33 bp, Homo sapiens
ttagaaagtgatggaacggaacccatggtcatg

SEQ ID NO: 33895 - DNA, 33 bp, Homo sapiens
gtcagtggaatctgcacggtcttggcgaggtct

SEQ ID NO: 33896 - DNA, 33 bp, Homo sapiens
ctagttttgagttacacgaatcagaaaaagtag

SEQ ID NO: 33897 - DNA, 33 bp, Homo sapiens
acatctcttttttcgaacccaacatgaaaccac

SEQ ID NO: 33898 - DNA, 33 bp, Homo sapiens
gctcctcaacgcttggccagaaagaatatcaca

SEQ ID NO: 33899 - DNA, 33 bp, Homo sapiens
acccttcacattcataggtcctagaagatgaat

SEQ ID NO: 33900 - DNA, 33 bp, Homo sapiens
gtcaacacacacatcaatcattacagatagtgg

SEQ ID NO: 33901 - DNA, 33 bp, Homo sapiens
aaagtctcatttaccacgttgagtttgaagttc

SEQ ID NO: 33902 - DNA, 33 bp, Homo sapiens
gcctttgcttacctggcattctgtaaattctga

SEQ ID NO: 33903 - DNA, 33 bp, Homo sapiens
ttgttatatttagcagaccaaacatggttaata

SEQ ID NO: 33904 - DNA, 33 bp, Homo sapiens
ctcccgggaccctgtacgtcaaaagcctctgac

SEQ ID NO: 33905 - DNA, 33 bp, Homo sapiens
actgttacatcttcatgaaaatatggtcctaca

SEQ ID NO: 33906 - DNA, 33 bp, Homo sapiens
tataacctcttccttacgtaaacaaacaatgtg

SEQ ID NO: 33907 - DNA, 33 bp, Homo sapiens
cttctatttcacttaagacctcatctactgttt

SEQ ID NO: 33908 - DNA, 51 bp, Homo sapiens
ttttcacaagaaaacagcacttaagccttctatatataatcactgttactt

SEQ ID NO: 33909 - DNA, 33 bp, Homo sapiens
ccccaggagcttcttacacatggactttgctgt

SEQ ID NO: 33910 - DNA, 33 bp, Homo sapiens
ggctctaatgtgcaaacagattgtgtgaatttt

SEQ ID NO: 33911 - DNA, 33 bp, Homo sapiens
gtggcttcagaaatgacggaacacggtgtgttc

SEQ ID NO: 33912 - DNA, 33 bp, Homo sapiens
aataaattcctcattacgctaaatcagcttgag

SEQ ID NO: 33913 - DNA, 51 bp, Homo sapiens
ggctagagatggaccactattagaaaagaaaacaaagaagaggtaataaga

SEQ ID NO: 33914 - DNA, 51 bp, Homo sapiens
gaatgctctgcattgagtagagtaaatgctcaggatgactcaggctgtttc

SEQ ID NO: 33915 - DNA, 33 bp, Homo sapiens
atcagcttcatgccaaatatggagatgcgtgag

SEQ ID NO: 33916 - DNA, 33 bp, Homo sapiens
tttatcatatctgaagacaggtgatgtaccttc

SEQ ID NO: 33917 - DNA, 33 bp, Homo sapiens
aactggaggagatatcaacatgaaatgaactca

SEQ ID NO: 33918 - DNA, 33 bp, Homo sapiens
cagatatgttacaatacagtccagtggatcttc

SEQ ID NO: 33919 - DNA, 33 bp, Homo sapiens
taaggaaagtacaaacaccaatgaaaattattt

SEQ ID NO: 33920 - DNA, 33 bp, Homo sapiens
gttcaatctaactgtacgtttgcatccactaac

SEQ ID NO: 33921 - DNA, 33 bp, Homo sapiens
atagggcaaaggagaacacttgcacctgtattt

SEQ ID NO: 33922 - DNA, 33 bp, Homo sapiens
aaaacaaaaagctttaagccgcttgaggagggg

SEQ ID NO: 33923 - DNA, 33 bp, Homo sapiens
gtttattgcatggcaaattattttcaaaattat

SEQ ID NO: 33924 - DNA, 33 bp, Homo sapiens
aactttcatgatgacaaattcctgttaaatgga

SEQ ID NO: 33925 - DNA, 33 bp, Homo sapiens
ttataaaacattatcaatctcctcggaatcatt

SEQ ID NO: 33926 - DNA, 33 bp, Homo sapiens
gaaaactgagatccaacaatgaaagtaactaag

SEQ ID NO: 33927 - DNA, 33 bp, Homo sapiens
tgtctttgaagtgtcaatgaaaactacagtatc

SEQ ID NO: 33928 - DNA, 33 bp, Homo sapiens
agatttagggtctccacataagaaaacaattcc

SEQ ID NO: 33929 - DNA, 33 bp, Homo sapiens
gccagtccctgtgatagatcttcatcctgacct

SEQ ID NO: 33930 - DNA, 33 bp, Homo sapiens
actaccattttttacacgctgcctatggctgtt

SEQ ID NO: 33931 - DNA, 33 bp, Homo sapiens
aatgcttagacgtgcaaacaaaattacatttca

SEQ ID NO: 33932 - DNA, 33 bp, Homo sapiens
agatcctttttggctcccaaatcatcccataaa

SEQ ID NO: 33933 - DNA, 33 bp, Homo sapiens
tggtaactttgaccaaggaatgacagctaccat

SEQ ID NO: 33934 - DNA, 33 bp, Homo sapiens
tactttacacagggaacgactgactgtttacag

SEQ ID NO: 33935 - DNA, 33 bp, Homo sapiens
tggaacgagtgaaacaaggaaagactctgaagg

SEQ ID NO: 33936 - DNA, 33 bp, Homo sapiens
tcaagatcaggagacaaggtgttcgctatatgg

SEQ ID NO: 33937 - DNA, 33 bp, Homo sapiens
cagcttttatcattgcacagcctgcatcccaac

SEQ ID NO: 33938 - DNA, 33 bp, Homo sapiens
gtgctaagcagaatacaaaagatgtgtgagaca

SEQ ID NO: 33939 - DNA, 33 bp, Homo sapiens
cttgaggaacacaagacggataaaacactaaca

SEQ ID NO: 33940 - DNA, 33 bp, Homo sapiens
tgggctgtgttttcaacaggttaaggcattctt

SEQ ID NO: 33941 - DNA, 33 bp, Homo sapiens
ctaaagtccgctaccccaaactttcctggagag

SEQ ID NO: 33942 - DNA, 33 bp, Homo sapiens
tggagccctgtgcccaatatctagtagggtctc

SEQ ID NO: 33943 - DNA, 33 bp, Homo sapiens
ttttagtaacctgggacaagtgacttcgactct

SEQ ID NO: 33944 - DNA, 33 bp, Homo sapiens
tgggaatgaaaatgtacaatttgcagctcttta

SEQ ID NO: 33945 - DNA, 33 bp, Homo sapiens
aaagttagctctagaactgtagattggagttca

SEQ ID NO: 33946 - DNA, 33 bp, Homo sapiens
attttggtctgccctgcaaaaactgtcatatta

SEQ ID NO: 33947 - DNA, 33 bp, Homo sapiens
aattatacattggtcaaaggaagaaagttgaat

SEQ ID NO: 33948 - DNA, 33 bp, Homo sapiens
ggtgtcctaggcaataaccaatcatagatgaat

SEQ ID NO: 33949 - DNA, 33 bp, Homo sapiens
cctgttttctagctaaaatcagtaaggagaggt

SEQ ID NO: 33950 - DNA, 33 bp, Homo sapiens
atgcacaccaaataccgggtagaggaaagataa

SEQ ID NO: 33951 - DNA, 33 bp, Homo sapiens
tctgactttgtaatcaaccctattcataagaac

SEQ ID NO: 33952 - DNA, 51 bp, Homo sapiens
tgtttctagcctagatgtctctctcaatgtccatagaaactcaagtttagt

SEQ ID NO: 33953 - DNA, 51 bp, Homo sapiens
ggatttccatttgctctgtaggtgacgataggatattgaagactttaaaga

SEQ ID NO: 33954 - DNA, 33 bp, Homo sapiens
gcaaattgaaggctcaaggtaggaatttaatgc

SEQ ID NO: 33955 - DNA, 33 bp, Homo sapiens
gttccaaatttagtaaaagtctgccctgcagaa

SEQ ID NO: 33956 - DNA, 33 bp, Homo sapiens
ggaagtttctgtaataaaagcaggagaaaataa

SEQ ID NO: 33957 - DNA, 33 bp, Homo sapiens
gagtcggtaagaatgaatcattaggctgttgta

SEQ ID NO: 33958 - DNA, 33 bp, Homo sapiens
cctgcctggaccttcgctatccttctctaacta

SEQ ID NO: 33959 - DNA, 33 bp, Homo sapiens
tagcatctaacataagactagattcagcatata

SEQ ID NO: 33960 - DNA, 33 bp, Homo sapiens
gtttttattgagacgaccacttagcccaagaca

SEQ ID NO: 33961 - DNA, 33 bp, Homo sapiens
tatgtaactggtggtaactttgaactggtagga

SEQ ID NO: 33962 - DNA, 33 bp, Homo sapiens
ataaaacagtttaccaaagaatacaagtataat

SEQ ID NO: 33963 - DNA, 33 bp, Homo sapiens
gttgaaataaattgaccaaaattgaaaacagta

SEQ ID NO: 33964 - DNA, 33 bp, Homo sapiens
ctctgcaatagtataaattagccattaggactg

SEQ ID NO: 33965 - DNA, 33 bp, Homo sapiens
aatcccatagtttggaaaaaagccaatttggaa

SEQ ID NO: 33966 - DNA, 33 bp, Homo sapiens
aacctgtactaagagaagccaggagagtatcta

SEQ ID NO: 33967 - DNA, 33 bp, Homo sapiens
aaaatgaaaaacgagcacttcttcagcttggaa

SEQ ID NO: 33968 - DNA, 33 bp, Homo sapiens
cattttgcaaggtttacgcagctatagcatttt

SEQ ID NO: 33969 - DNA, 33 bp, Homo sapiens
atcaaaacactaatagaatccataaacacagac

SEQ ID NO: 33970 - DNA, 33 bp, Homo sapiens
tagacaaaaagttctacggaagtcgaaatgtca

SEQ ID NO: 33971 - DNA, 33 bp, Homo sapiens
caaaaggttgatagtgaaagacagtgtagggat

SEQ ID NO: 33972 - DNA, 33 bp, Homo sapiens
gattttcacatttacacccttgttctactttat

SEQ ID NO: 33973 - DNA, 33 bp, Homo sapiens
tcaaagccactctacacacaaaatgaatctctt

SEQ ID NO: 33974 - DNA, 33 bp, Homo sapiens
gaaaagtacttcataactgctaagttctattac

SEQ ID NO: 33975 - DNA, 33 bp, Homo sapiens
ttggccattgtcaattgaaactaaagagtagct

SEQ ID NO: 33976 - DNA, 33 bp, Homo sapiens
ctacaaggaaacatggaatgtatgagtggtggg

SEQ ID NO: 33977 - DNA, 33 bp, Homo sapiens
caaaggtttgcaggaaagcttttgacatatggg

SEQ ID NO: 33978 - DNA, 33 bp, Homo sapiens
aagacagcatgagctacaatacggaaaatgctt

SEQ ID NO: 33979 - DNA, 33 bp, Homo sapiens
tttttacttattagagaaaacatgaacatctat

SEQ ID NO: 33980 - DNA, 33 bp, Homo sapiens
atctgccggacaaggggagtatattagtcaggg

SEQ ID NO: 33981 - DNA, 51 bp, Homo sapiens
aattattttttatgaaatagacatgaaaatttatgtaaaacctactaatgc

SEQ ID NO: 33982 - DNA, 51 bp, Homo sapiens
attggttttcatcttattattattccataaatggcattagtaggttttaca

SEQ ID NO: 33983 - DNA, 51 bp, Homo sapiens
aatatttcttctcttaagacatcataagaatacaaattacaatccattttt

SEQ ID NO: 33984 - DNA, 33 bp, Homo sapiens
ccaatcatctgttgacgctgagctggaaatgtc

SEQ ID NO: 33985 - DNA, 33 bp, Homo sapiens
aatacttggagtaaaagagtttctggccacagt

SEQ ID NO: 33986 - DNA, 51 bp, Homo sapiens
tcaaaattgaacagactgggaacaccgtgaaggcttcatcagggtattttg

SEQ ID NO: 33987 - DNA, 33 bp, Homo sapiens
taaaaatcatcacagtaaaaatatgcttctgtg

SEQ ID NO: 33988 - DNA, 33 bp, Homo sapiens
tggtccaaattttctaacctgacatcatgttca

SEQ ID NO: 33989 - DNA, 51 bp, Homo sapiens
tagtaaataaaagttggaataaataagtttgtcatttattatatacaggta

SEQ ID NO: 33990 - DNA, 33 bp, Homo sapiens
tgtgtgtgtctgtgtacaagggtgggagcaatt

SEQ ID NO: 33991 - DNA, 33 bp, Homo sapiens
tagcttgattctctcacgcttatttcaccccca

SEQ ID NO: 33992 - DNA, 33 bp, Homo sapiens
aatgcttgttgttgtacgctgctagggtaattc

SEQ ID NO: 33993 - DNA, 51 bp, Homo sapiens
ctgatacagaagttcaattttttaaagacatgttcaatttattctttttca

SEQ ID NO: 33994 - DNA, 33 bp, Homo sapiens
aaaaattcaggtaaaagccttgaatctgaaatc

SEQ ID NO: 33995 - DNA, 33 bp, Homo sapiens
caatgctaaaggtttcacataagagggtcgtga

SEQ ID NO: 33996 - DNA, 33 bp, Homo sapiens
accctaacatccatgaagcaactgggccacagg

SEQ ID NO: 33997 - DNA, 33 bp, Homo sapiens
ctctccatttaacttacgttcaactgcaataac

SEQ ID NO: 33998 - DNA, 33 bp, Homo sapiens
aatctcagtctacaaactgctacacctgcaaaa

SEQ ID NO: 33999 - DNA, 33 bp, Homo sapiens
acaaagttcactgcaaatataagctgtagtgaa

SEQ ID NO: 34000 - DNA, 33 bp, Homo sapiens
ggagccagagaggtaccatgtgccggagtgaca

SEQ ID NO: 34001 - DNA, 33 bp, Homo sapiens
aaaaagtacaacctgaagtttgcagaaaggcat

SEQ ID NO: 34002 - DNA, 33 bp, Homo sapiens
actggtaagattattaaagcctgaagtctgaac

SEQ ID NO: 34003 - DNA, 33 bp, Homo sapiens
aaattgtccataaccaatattctgcagacttaa

SEQ ID NO: 34004 - DNA, 33 bp, Homo sapiens
tttgtaggaccatttcaaactatgtcaaagaag

SEQ ID NO: 34005 - DNA, 33 bp, Homo sapiens
acagttcaggttcttcaacagagagtttgtaaa

SEQ ID NO: 34006 - DNA, 33 bp, Homo sapiens
tttccagttttgtccagtccatcccagatgcac

SEQ ID NO: 34007 - DNA, 33 bp, Homo sapiens
catttaggatccattaaaagttggaggttgtga

SEQ ID NO: 34008 - DNA, 33 bp, Homo sapiens
aagtagtaaatcattgacaaatacttggtagtt

SEQ ID NO: 34009 - DNA, 33 bp, Homo sapiens
tccaatctaacctaaccggtgttctcataagaa

SEQ ID NO: 34010 - DNA, 33 bp, Homo sapiens
gacataaattctataacaagtgtccatcgtttt

SEQ ID NO: 34011 - DNA, 33 bp, Homo sapiens
ttgggtcattgtatgcacatcgttgtaactgac

SEQ ID NO: 34012 - DNA, 33 bp, Homo sapiens
aatagagatctgagtacgactgaaaaaattaca

SEQ ID NO: 34013 - DNA, 33 bp, Homo sapiens
agggggcattttattacagattgtatactacta

SEQ ID NO: 34014 - DNA, 33 bp, Homo sapiens
atgataaatttgagtacctggaaatgaaaacat

SEQ ID NO: 34015 - DNA, 33 bp, Homo sapiens
cctcctgctgtttataaattgcaacatccctgg

SEQ ID NO: 34016 - DNA, 33 bp, Homo sapiens
cataaatagttcacaccgaaggactctgtgcag

SEQ ID NO: 34017 - DNA, 33 bp, Homo sapiens
ctgccgcgacccagcacgtctgtggttgtaagg

SEQ ID NO: 34018 - DNA, 51 bp, Homo sapiens
aattaaatgtgtagtaaccaccaacagatgctaaaaaacaggaaaattaag

SEQ ID NO: 34019 - DNA, 33 bp, Homo sapiens
ttggtgaagactaccactgacacatttttttct

SEQ ID NO: 34020 - DNA, 51 bp, Homo sapiens
caataactaggtaatcatcttctaacgcaatcatctacatcaatcatgcac

SEQ ID NO: 34021 - DNA, 33 bp, Homo sapiens
gttccagtcttgagcaatcgtaattatattata

SEQ ID NO: 34022 - DNA, 33 bp, Homo sapiens
cctagaagccatgaagaaaaaactaacttctgt

SEQ ID NO: 34023 - DNA, 51 bp, Homo sapiens
accctccttcctgggaccctgttcacaagtctatgcatctgtagcaatgta

SEQ ID NO: 34024 - DNA, 33 bp, Homo sapiens
tatcaatcagaaagacggcagccgtggcgtgga

SEQ ID NO: 34025 - DNA, 33 bp, Homo sapiens
cagacacaaaccagacacagcttatgtaccgct

SEQ ID NO: 34026 - DNA, 33 bp, Homo sapiens
acaccttttctcattacgtaagcataggtgctg

SEQ ID NO: 34027 - DNA, 33 bp, Homo sapiens
ataacagtggcaaaataatttatatacatgata

SEQ ID NO: 34028 - DNA, 33 bp, Homo sapiens
cctacctaaaaggctgccaaccatgcagaggag

SEQ ID NO: 34029 - DNA, 33 bp, Homo sapiens
tactctattagcaataagggatgtgagcaccag

SEQ ID NO: 34030 - DNA, 33 bp, Homo sapiens
gacacaacagaaaaacagaactcgaatctgact

SEQ ID NO: 34031 - DNA, 33 bp, Homo sapiens
tagtgccacaagctaaaccttttcatcgcacct

SEQ ID NO: 34032 - DNA, 33 bp, Homo sapiens
acccatcttccactaacatttccttagccaaat

SEQ ID NO: 34033 - DNA, 33 bp, Homo sapiens
taaaccttcacatgtaacttttgaatgtaaaat

SEQ ID NO: 34034 - DNA, 33 bp, Homo sapiens
cctctgatcccgaagccctcactctactaacag

SEQ ID NO: 34035 - DNA, 33 bp, Homo sapiens
ttaagctggaagttctaacagaaagatagtggg

SEQ ID NO: 34036 - DNA, 33 bp, Homo sapiens
agcaaaaacaatggtcaattctaaacttgtagg

SEQ ID NO: 34037 - DNA, 33 bp, Homo sapiens
tctgccacttacccaccgaacagtacaagtgtg

SEQ ID NO: 34038 - DNA, 33 bp, Homo sapiens
attactggcagtagaacgcagaagagaaactca

SEQ ID NO: 34039 - DNA, 33 bp, Homo sapiens
attcattcctaagtaaatagactcaacagtgag

SEQ ID NO: 34040 - DNA, 33 bp, Homo sapiens
gtggctgcctttgagaagagatgttctttccct

SEQ ID NO: 34041 - DNA, 33 bp, Homo sapiens
tatttgtgagaagttagaattctgcctttgttt

SEQ ID NO: 34042 - DNA, 33 bp, Homo sapiens
gaattcagttcttccaaataaaatccattttca

SEQ ID NO: 34043 - DNA, 33 bp, Homo sapiens
attctggatgcacttcacttgaaaaacagaacc

SEQ ID NO: 34044 - DNA, 33 bp, Homo sapiens
ttcaaaacagattatcacacttcttcatagcta

SEQ ID NO: 34045 - DNA, 33 bp, Homo sapiens
aagcccaattgtttacactcaaagtatagaata

SEQ ID NO: 34046 - DNA, 33 bp, Homo sapiens
agcctggatttttggacggaaattgttctccat

SEQ ID NO: 34047 - DNA, 33 bp, Homo sapiens
tctctccagatgcagacgtggccatgcctcttg

SEQ ID NO: 34048 - DNA, 33 bp, Homo sapiens
cccatgctggaagctacagtctgcttaaaacct

SEQ ID NO: 34049 - DNA, 33 bp, Homo sapiens
tataatcttaagtgaactgagaaacaggaaatc

SEQ ID NO: 34050 - DNA, 33 bp, Homo sapiens
acagacctgagactccagaaataagtcttcatt

SEQ ID NO: 34051 - DNA, 51 bp, Homo sapiens
ggcaagttgtagtcttctctgttcactctatcagttaaatttccctccatt

SEQ ID NO: 34052 - DNA, 33 bp, Homo sapiens
cagctgatggtttaataaatccttctacataat

SEQ ID NO: 34053 - DNA, 33 bp, Homo sapiens
tgaaatcaagcgatgacggagtattgaaagatg

SEQ ID NO: 34054 - DNA, 33 bp, Homo sapiens
atgctaatggaaaacaatatgtatttgcaggca

SEQ ID NO: 34055 - DNA, 33 bp, Homo sapiens
atgactttgtttagcacgagcaagtgtcaggga

SEQ ID NO: 34056 - DNA, 33 bp, Homo sapiens
tatggagttttaataacgcaatgttgccaacaa

SEQ ID NO: 34057 - DNA, 33 bp, Homo sapiens
attgctttgaacaagagaatttggtgaagtgag

SEQ ID NO: 34058 - DNA, 33 bp, Homo sapiens
cttaagttatgccttgaaagcaaataatctgaa

SEQ ID NO: 34059 - DNA, 33 bp, Homo sapiens
tttcccaagactgctcaattcttacttcaggga

SEQ ID NO: 34060 - DNA, 33 bp, Homo sapiens
gcttatattttactcaagagaggcagaagagca

SEQ ID NO: 34061 - DNA, 33 bp, Homo sapiens
tccagacaacagaatactatccactggtttaaa

SEQ ID NO: 34062 - DNA, 33 bp, Homo sapiens
ttcagttttccttcaagaagaaggctacgttct

SEQ ID NO: 34063 - DNA, 33 bp, Homo sapiens
ctccctgctgtgaattaaaacttgccgaagcag

SEQ ID NO: 34064 - DNA, 33 bp, Homo sapiens
cttaaataaaaaaggagcactgagattcgttta

SEQ ID NO: 34065 - DNA, 33 bp, Homo sapiens
atcatctttatcacaccgcacagaaaacaagcc

SEQ ID NO: 34066 - DNA, 51 bp, Homo sapiens
tttagaagctgaaaaagtctgtcagaaccatgtacaacatccaatatccga

SEQ ID NO: 34067 - DNA, 51 bp, Homo sapiens
tgtttagtaaagccaagtcatactacaggagaacacattcagatgcaagtg

SEQ ID NO: 34068 - DNA, 33 bp, Homo sapiens
taggctgaataaagtaccttgccctgcccactg

SEQ ID NO: 34069 - DNA, 33 bp, Homo sapiens
ctcctcttacccagtacatcatttccacattgc

SEQ ID NO: 34070 - DNA, 33 bp, Homo sapiens
cttctatgctcacggaagaccaaatttgccttg

SEQ ID NO: 34071 - DNA, 33 bp, Homo sapiens
agatggaaggaaaagacgctaggaaaaaatcaa

SEQ ID NO: 34072 - DNA, 33 bp, Homo sapiens
atatttatctaaacacaatgaagcaactgcttg

SEQ ID NO: 34073 - DNA, 33 bp, Homo sapiens
caaatctcagttgttacgggcatttatagctat

SEQ ID NO: 34074 - DNA, 33 bp, Homo sapiens
gagtcaagaagtaacaccctgggaatgattggc

SEQ ID NO: 34075 - DNA, 33 bp, Homo sapiens
attaaggagatctttacgtttttctagacacag

SEQ ID NO: 34076 - DNA, 33 bp, Homo sapiens
atagtgacaaataaataaaagtgaaaggacttc

SEQ ID NO: 34077 - DNA, 33 bp, Homo sapiens
ttcagtttgtagtttacaggagttattttgcag

SEQ ID NO: 34078 - DNA, 33 bp, Homo sapiens
ctgagaatctggtggacaagaagccacagctca

SEQ ID NO: 34079 - DNA, 33 bp, Homo sapiens
ctgctgaacgtgttccacttggcaccaacacca

SEQ ID NO: 34080 - DNA, 33 bp, Homo sapiens
ccctacaactgaccaacgaactggtgagtgaac

SEQ ID NO: 34081 - DNA, 33 bp, Homo sapiens
aattcccagtggaagcgcttgctgtagaaagat

SEQ ID NO: 34082 - DNA, 33 bp, Homo sapiens
ttctcctcacaggccacgtactgttttcctgat

SEQ ID NO: 34083 - DNA, 33 bp, Homo sapiens
aattacgatattcctacacacggagcttcccct

SEQ ID NO: 34084 - DNA, 33 bp, Homo sapiens
atccttatatttagcacctggcaggtaatataa

SEQ ID NO: 34085 - DNA, 33 bp, Homo sapiens
ccatcagagcacttacacggactagaggctttt

SEQ ID NO: 34086 - DNA, 33 bp, Homo sapiens
acatcaacttaccgcaagtctgagactatctcc

SEQ ID NO: 34087 - DNA, 33 bp, Homo sapiens
gagtcggtcgtcatcaaggaaagaacactgtct

SEQ ID NO: 34088 - DNA, 33 bp, Homo sapiens
cttacgatattagaccactttacttaccatcct

SEQ ID NO: 34089 - DNA, 33 bp, Homo sapiens
ccacatacagtccttgaaaagaagaggagaaaa

SEQ ID NO: 34090 - DNA, 33 bp, Homo sapiens
agtcattgctaaattcaaagtcacctgcatttc

SEQ ID NO: 34091 - DNA, 51 bp, Homo sapiens
attctgtctaagccagaacatagacaaggaagactaaaaccctattttgtt

SEQ ID NO: 34092 - DNA, 33 bp, Homo sapiens
ttcttggtgcaaaaataaccatgttacctgtgt

SEQ ID NO: 34093 - DNA, 33 bp, Homo sapiens
gtatgcaaactcagatcaaagtgaggattatca

SEQ ID NO: 34094 - DNA, 33 bp, Homo sapiens
acacacagcttggttacctagtgatgttggtac

SEQ ID NO: 34095 - DNA, 33 bp, Homo sapiens
ctggtcaaagacttaccacattctttacatttc

SEQ ID NO: 34096 - DNA, 33 bp, Homo sapiens
gtcacaattaaacttgaaggaaggcccaggaat

SEQ ID NO: 34097 - DNA, 33 bp, Homo sapiens
ggttaatgaagaagaaaacaccttatccttctg

SEQ ID NO: 34098 - DNA, 33 bp, Homo sapiens
ggacagatgggagggacacagaaagaaagcatg

SEQ ID NO: 34099 - DNA, 51 bp, Homo sapiens
cttatgtgagaaatagtggagggaacgagagatggtcagctttaaactgcc

SEQ ID NO: 34100 - DNA, 33 bp, Homo sapiens
agcgatttgagacctaagtgaaaaagaatatat

SEQ ID NO: 34101 - DNA, 51 bp, Homo sapiens
ttctttcgattcaacagttaggtaacactgttcttgtccattctgcaaatg

SEQ ID NO: 34102 - DNA, 33 bp, Homo sapiens
agccatgtctttcttccaccacaggctgcatgg

SEQ ID NO: 34103 - DNA, 51 bp, Homo sapiens
tttcctcatctggcagatgaacaaacgatgagcctgttgagcagcctcaca

SEQ ID NO: 34104 - DNA, 33 bp, Homo sapiens
tgtgccttctaaaatacacgggactcactggtc

SEQ ID NO: 34105 - DNA, 33 bp, Homo sapiens
ggtttgcttgaaagtaacattaacaggccaggt

SEQ ID NO: 34106 - DNA, 33 bp, Homo sapiens
ttttaaaatgagaaccacaatcagagttaaatg

SEQ ID NO: 34107 - DNA, 33 bp, Homo sapiens
aagatgccctagtttcaaggtgtgcacgtctcc

SEQ ID NO: 34108 - DNA, 33 bp, Homo sapiens
ctggtggccgccgtgacgcatgagcttggcctc

SEQ ID NO: 34109 - DNA, 33 bp, Homo sapiens
atattcactggagacactcaaccctcggctcac

SEQ ID NO: 34110 - DNA, 33 bp, Homo sapiens
cttgtacaaagtacacagaagactatgacacta

SEQ ID NO: 34111 - DNA, 33 bp, Homo sapiens
acaaaggcatttcaaaacaataaccttaggcaa

SEQ ID NO: 34112 - DNA, 33 bp, Homo sapiens
taacaagttggctaacaagttcacatcttttaa

SEQ ID NO: 34113 - DNA, 33 bp, Homo sapiens
gggtcttccggttctacgaacacagccactgac

SEQ ID NO: 34114 - DNA, 33 bp, Homo sapiens
tcaagtaagttgactgacaatttttctaagcag

SEQ ID NO: 34115 - DNA, 33 bp, Homo sapiens
aattgtgtgttataaaaagaaggtgtctgtctt

SEQ ID NO: 34116 - DNA, 33 bp, Homo sapiens
agccaaaacaacttgcagaaaataagtctacag

SEQ ID NO: 34117 - DNA, 33 bp, Homo sapiens
gacgaggctttacaacagtgatgtttgggtgag

SEQ ID NO: 34118 - DNA, 33 bp, Homo sapiens
ttgtattctccagtaacgtaagaacccacttaa

SEQ ID NO: 34119 - DNA, 51 bp, Homo sapiens
taaaagcacaagtctgtcctaactagagtagtattaaaatgtgactatttt

SEQ ID NO: 34120 - DNA, 33 bp, Homo sapiens
agctggtaaatggaagaatgaagacttgaatac

SEQ ID NO: 34121 - DNA, 33 bp, Homo sapiens
tgaggaccaatttctgacaaaatttgtgaacac

SEQ ID NO: 34122 - DNA, 33 bp, Homo sapiens
tgagcgggtcacaagaagagtgtcaggatcaag

SEQ ID NO: 34123 - DNA, 33 bp, Homo sapiens
attatactgaggaacacgtggaatgtaaactgt

SEQ ID NO: 34124 - DNA, 33 bp, Homo sapiens
gatgactctacctaacaattggagatccgtaac

SEQ ID NO: 34125 - DNA, 33 bp, Homo sapiens
agggtctgggttacacaatagagtcatacatat

SEQ ID NO: 34126 - DNA, 33 bp, Homo sapiens
tgtgcagtctctatacaccggctgaaagcagct

SEQ ID NO: 34127 - DNA, 33 bp, Homo sapiens
gaagaaaagaaaattacaggactggacaggtgc

SEQ ID NO: 34128 - DNA, 33 bp, Homo sapiens
tgaacgttggcatacacgttgtttgagtccctg

SEQ ID NO: 34129 - DNA, 51 bp, Homo sapiens
taaacagggattcaagagaataaaaactaaagatactagaacttttaatga

SEQ ID NO: 34130 - DNA, 33 bp, Homo sapiens
ctgggaggacctgacaaagcaaccatttatcag

SEQ ID NO: 34131 - DNA, 33 bp, Homo sapiens
ggggctttggtttatacgagtaatttgcataga

SEQ ID NO: 34132 - DNA, 33 bp, Homo sapiens
gtgtttttggttgatcacctgcttatttgtaac

SEQ ID NO: 34133 - DNA, 33 bp, Homo sapiens
gccacgctcttttcaacaatcgcctctcgtgag

SEQ ID NO: 34134 - DNA, 33 bp, Homo sapiens
cattgtggctgagtgcacaccttgatgaagtgc

SEQ ID NO: 34135 - DNA, 33 bp, Homo sapiens
gaaaaatgagagccacacaaaagggtttttttc

SEQ ID NO: 34136 - DNA, 33 bp, Homo sapiens
agcgatagcagagcatcaaccaagtgcctgacc

SEQ ID NO: 34137 - DNA, 33 bp, Homo sapiens
catgtacctcatcaaacatcagtaactcacaac

SEQ ID NO: 34138 - DNA, 33 bp, Homo sapiens
ctctgcccttaacttacgcctcataaaatcagt

SEQ ID NO: 34139 - DNA, 33 bp, Homo sapiens
ttcctgttggcaattcaaagtgttggtgtcaaa

SEQ ID NO: 34140 - DNA, 33 bp, Homo sapiens
gtggtcaagtggatgactcaatgacttgccagg

SEQ ID NO: 34141 - DNA, 33 bp, Homo sapiens
cgcgagcaaacagacccggcttgacctcatgtc

SEQ ID NO: 34142 - DNA, 33 bp, Homo sapiens
ggccctcaaagcaagtaaagctcttcctgaaaa

SEQ ID NO: 34143 - DNA, 33 bp, Homo sapiens
ccatcattttgagttcaccatttttttctatgt

SEQ ID NO: 34144 - DNA, 51 bp, Homo sapiens
aatttccaaagagtagcctgattgccataaagccctctctgccttcacaat

SEQ ID NO: 34145 - DNA, 51 bp, Homo sapiens
aagtaactctggcctttaacgtttacgagcttagcaggtctctggccgagg

SEQ ID NO: 34146 - DNA, 33 bp, Homo sapiens
gaaataggtctttcataaatctgtgagctcacc

SEQ ID NO: 34147 - DNA, 33 bp, Homo sapiens
atgtggcctcaataggacagatctttaatggat

SEQ ID NO: 34148 - DNA, 33 bp, Homo sapiens
aagagcagtgggcaccgaagtcaaaatgcagat

SEQ ID NO: 34149 - DNA, 33 bp, Homo sapiens
gcttggctgtgttatccaaattcttgaggctcg

SEQ ID NO: 34150 - DNA, 33 bp, Homo sapiens
ctgtttgaagagggaaactaattgtatttaaca

SEQ ID NO: 34151 - DNA, 33 bp, Homo sapiens
gagtgccctctcatccactctcagacttactcc

SEQ ID NO: 34152 - DNA, 33 bp, Homo sapiens
ctgcagagccctatcaaagagctcctaacacgt

SEQ ID NO: 34153 - DNA, 33 bp, Homo sapiens
tcctagtttttggacaactttgagccgaatagg

SEQ ID NO: 34154 - DNA, 33 bp, Homo sapiens
atcagattttcagccacggttttcaaataaact

SEQ ID NO: 34155 - DNA, 33 bp, Homo sapiens
gtgtctgttgttctcacctgttaagtccatagg

SEQ ID NO: 34156 - DNA, 33 bp, Homo sapiens
tgctggtcatgctagaagaagccatgtaggcca

SEQ ID NO: 34157 - DNA, 33 bp, Homo sapiens
tgtccatccatacttcagaaattacttaacagt

SEQ ID NO: 34158 - DNA, 33 bp, Homo sapiens
gaatgaaaactgaaaactgagactgtaaatctg

SEQ ID NO: 34159 - DNA, 33 bp, Homo sapiens
tgagctagtggcaaaaagactggaggtggcccg

SEQ ID NO: 34160 - DNA, 33 bp, Homo sapiens
taccttgaaattcagccgccttgttttactctc

SEQ ID NO: 34161 - DNA, 33 bp, Homo sapiens
agaatattaatacatcaaacaacttcatcctta

SEQ ID NO: 34162 - DNA, 33 bp, Homo sapiens
caagctgagaaaaaaaaggtgcaggaaacaagg

SEQ ID NO: 34163 - DNA, 33 bp, Homo sapiens
aaagggttagaactacggacctactaccatgtc

SEQ ID NO: 34164 - DNA, 33 bp, Homo sapiens
ataaaattggaattcacagttctgaaatcaaac

SEQ ID NO: 34165 - DNA, 33 bp, Homo sapiens
aatatatgatccttacccattcagactcatcat

SEQ ID NO: 34166 - DNA, 33 bp, Homo sapiens
ccacctctgttgaacactaaagacaaaggagag

SEQ ID NO: 34167 - DNA, 33 bp, Homo sapiens
gctctcatttcaaaataagggactggccttaaa

SEQ ID NO: 34168 - DNA, 33 bp, Homo sapiens
catgtttgagtctttccatgaatatatgctttt

SEQ ID NO: 34169 - DNA, 33 bp, Homo sapiens
aattttaacaatttaacagtgtggtacagcttt

SEQ ID NO: 34170 - DNA, 33 bp, Homo sapiens
tcctcggttttcaggaaaagttaggctagaaac

SEQ ID NO: 34171 - DNA, 33 bp, Homo sapiens
tgatccagcactgtatcaggggttatggcaaca

SEQ ID NO: 34172 - DNA, 33 bp, Homo sapiens
acctgaccaactgtcactctccaaagacactta

SEQ ID NO: 34173 - DNA, 33 bp, Homo sapiens
gccctcatggttcttacagtttggtggcagaga

SEQ ID NO: 34174 - DNA, 33 bp, Homo sapiens
cttatgtcctgactgaccatgagctgagagccg

SEQ ID NO: 34175 - DNA, 33 bp, Homo sapiens
gtcaacactgcatgaaagtaactgagggggccg

SEQ ID NO: 34176 - DNA, 33 bp, Homo sapiens
tagaagcgaggaaacaatatgaggagatcaact

SEQ ID NO: 34177 - DNA, 33 bp, Homo sapiens
tccaaatagcttcataagtagtaactgtgaact

SEQ ID NO: 34178 - DNA, 33 bp, Homo sapiens
cccattccttcgaaaacataaatgggtcattag

SEQ ID NO: 34179 - DNA, 51 bp, Homo sapiens
aggctggaggtgggtttttagaagccgactcccagagagacagtgtctaga

SEQ ID NO: 34180 - DNA, 33 bp, Homo sapiens
acaggtcaacaattcaccctcttctcactgtct

SEQ ID NO: 34181 - DNA, 33 bp, Homo sapiens
gaacaatcactattggccaggtacagcaatatg

SEQ ID NO: 34182 - DNA, 33 bp, Homo sapiens
gtacacaaacaaactacgctttctaatgttttc

SEQ ID NO: 34183 - DNA, 33 bp, Homo sapiens
gaaaagattagatggacaccaaaactgtgattg

SEQ ID NO: 34184 - DNA, 33 bp, Homo sapiens
acaaagtcagtcagatcaaagttcaagaccagt

SEQ ID NO: 34185 - DNA, 33 bp, Homo sapiens
cttgctgcagcctctaaatcagaatttggtgct

SEQ ID NO: 34186 - DNA, 33 bp, Homo sapiens
agcatattaccatactcaacaattgtaacacaa

SEQ ID NO: 34187 - DNA, 33 bp, Homo sapiens
cttttctgtagtataacgtttgtgagattcatc

SEQ ID NO: 34188 - DNA, 33 bp, Homo sapiens
cagcagtaccactacacacaagatggatgaatc

SEQ ID NO: 34189 - DNA, 33 bp, Homo sapiens
ttcttacatttggctgcacttaccacaggtgct

SEQ ID NO: 34190 - DNA, 33 bp, Homo sapiens
tttcaattctagccctcaaattcatctgtggtg

SEQ ID NO: 34191 - DNA, 33 bp, Homo sapiens
actacctgggctatcactaacattcactcaagg

SEQ ID NO: 34192 - DNA, 33 bp, Homo sapiens
ccttgtctctcacttacgcttttgatacactga

SEQ ID NO: 34193 - DNA, 33 bp, Homo sapiens
ctgggctagccattcacaaaaaaaactatcaat

SEQ ID NO: 34194 - DNA, 33 bp, Homo sapiens
aggataaaaccatcacaggaagaataagttcaa

SEQ ID NO: 34195 - DNA, 51 bp, Homo sapiens
caaatgtgacagagaaccagcatatcacagtgaataagcatgcagtctctg

SEQ ID NO: 34196 - DNA, 33 bp, Homo sapiens
tgacatcctcaaacacagtgaactgaaagcaaa

SEQ ID NO: 34197 - DNA, 33 bp, Homo sapiens
gctgcatctactagaaaggctatatgttgtcca

SEQ ID NO: 34198 - DNA, 51 bp, Homo sapiens
aataaaattggatacctttttgtaaatatctccataagtttcaaaaatgtg

SEQ ID NO: 34199 - DNA, 33 bp, Homo sapiens
ctaacttttgtttttaccaaccatccttcatca

SEQ ID NO: 34200 - DNA, 33 bp, Homo sapiens
acagctcaagacccgaaactatgtgcctctttt

SEQ ID NO: 34201 - DNA, 33 bp, Homo sapiens
ttagcctgaagagagactaaatttgttgaattc

SEQ ID NO: 34202 - DNA, 33 bp, Homo sapiens
caatgtctgacttgcacaaataaggcagcttcc

SEQ ID NO: 34203 - DNA, 51 bp, Homo sapiens
cacagattacccctgagagcacatcaatatatattaccaaggatacttatc

SEQ ID NO: 34204 - DNA, 33 bp, Homo sapiens
gttctcagagcacatgaatatatgaactggaat

SEQ ID NO: 34205 - DNA, 33 bp, Homo sapiens
tatgatccagacatcactctttttttactgaag

SEQ ID NO: 34206 - DNA, 33 bp, Homo sapiens
gccctagataactctgaagataagttgccagtg

SEQ ID NO: 34207 - DNA, 33 bp, Homo sapiens
ttaagatggctgttaacgaaaagataagagata

SEQ ID NO: 34208 - DNA, 51 bp, Homo sapiens
gataaaagctcacagagcaaaggcaaatagttcatactaagtagcataaag

SEQ ID NO: 34209 - DNA, 33 bp, Homo sapiens
aattatcactgacattaaagatcacttgaatct

SEQ ID NO: 34210 - DNA, 33 bp, Homo sapiens
gccgagtgtctttgcaatattggttaatcatct

SEQ ID NO: 34211 - DNA, 33 bp, Homo sapiens
tcattgaattggattaaattgtctcctccattg

SEQ ID NO: 34212 - DNA, 51 bp, Homo sapiens
tctttcttaaatttcattatctaacaaattgtaaatgtatacaaaatgatt

SEQ ID NO: 34213 - DNA, 33 bp, Homo sapiens
attttaacagtaattgaaaacatcagatttagt

SEQ ID NO: 34214 - DNA, 33 bp, Homo sapiens
ttatcctcaagcagcaagggattttttttgcag

SEQ ID NO: 34215 - DNA, 33 bp, Homo sapiens
agaattttttcacacactaaggcgttcttcctc

SEQ ID NO: 34216 - DNA, 51 bp, Homo sapiens
cacatctctcatcatagccagctacaacttgggcagccttttcttatagtg

SEQ ID NO: 34217 - DNA, 33 bp, Homo sapiens
ttattattgtatcaaaatcaccaaataagctct

SEQ ID NO: 34218 - DNA, 33 bp, Homo sapiens
tatccttgaagaaaaccgtgatgtctctattaa

SEQ ID NO: 34219 - DNA, 33 bp, Homo sapiens
tgtgtaggattgtggaacggttgaccaagtcag

SEQ ID NO: 34220 - DNA, 33 bp, Homo sapiens
tatccaatgctatcaaggtactatattttaaac

SEQ ID NO: 34221 - DNA, 51 bp, Homo sapiens
tgggactcttaaattgagatctcccactaggcaatattatagagtcactga

SEQ ID NO: 34222 - DNA, 33 bp, Homo sapiens
tttttcatatatacgaagtcagatccttgccac

SEQ ID NO: 34223 - DNA, 33 bp, Homo sapiens
tttttctttgtgaacaagtaaattgaaatgaaa

SEQ ID NO: 34224 - DNA, 33 bp, Homo sapiens
ccttagttggcacctgcactacatttcaaggca

SEQ ID NO: 34225 - DNA, 33 bp, Homo sapiens
aaccattcactggaaaaatattcttcaggttat

SEQ ID NO: 34226 - DNA, 33 bp, Homo sapiens
atgttaacaggcagtacaaaaattacctctttc

SEQ ID NO: 34227 - DNA, 51 bp, Homo sapiens
tcttagcagtgaacacctttgctatcaagattatttcctctgctatgagtt

SEQ ID NO: 34228 - DNA, 51 bp, Homo sapiens
gaaatttgatctaaagagcacttaacatggaaggagtgaggaagacagaga

SEQ ID NO: 34229 - DNA, 33 bp, Homo sapiens
aaaaatactgtattcacgtcaaaaaggatagtg

SEQ ID NO: 34230 - DNA, 33 bp, Homo sapiens
gacatgttaaatgacacgaagaagatgtaataa

SEQ ID NO: 34231 - DNA, 33 bp, Homo sapiens
cccatgctatggactgaaagaatgaatattgtt

SEQ ID NO: 34232 - DNA, 33 bp, Homo sapiens
ttcttgactctccttacagttggttactttttg

SEQ ID NO: 34233 - DNA, 51 bp, Homo sapiens
taggacaacatctcacaaaatcatacgttacaggaaatgcatgaacagcca

SEQ ID NO: 34234 - DNA, 51 bp, Homo sapiens
ctggtcttaccctagtcctatattccacccaaaagaaataaatcaaattgc

SEQ ID NO: 34235 - DNA, 51 bp, Homo sapiens
tagctcccatcacttattccaaatcgataaaaactctaagacagattttaa

SEQ ID NO: 34236 - DNA, 33 bp, Homo sapiens
tgggattgatagcctaataatagaagcaaaatg

SEQ ID NO: 34237 - DNA, 51 bp, Homo sapiens
ggagaaaatgtgcagaaggttgacacgttactaagaacaaactaacagtac

SEQ ID NO: 34238 - DNA, 33 bp, Homo sapiens
ttagaaataacctaaactgattggacaaaagtt

SEQ ID NO: 34239 - DNA, 33 bp, Homo sapiens
ttttcagtgtttagtagcctattaagcaaaaga

SEQ ID NO: 34240 - DNA, 33 bp, Homo sapiens
atagtagtgtataaaccgcacatatcgttttat

SEQ ID NO: 34241 - DNA, 33 bp, Homo sapiens
cctaaaatcacagttccaagaatgtaacccttg

SEQ ID NO: 34242 - DNA, 33 bp, Homo sapiens
tgcacaaatgtcatcaggtcctcattgtgcaaa

SEQ ID NO: 34243 - DNA, 33 bp, Homo sapiens
ctagacaggacagtaaacgagggagaaatttgg

SEQ ID NO: 34244 - DNA, 33 bp, Homo sapiens
tgcttgctgttctcaccgtagagccagccttcc

SEQ ID NO: 34245 - DNA, 33 bp, Homo sapiens
tcataaatcatagtgaagtaaaagcaggtttta

SEQ ID NO: 34246 - DNA, 33 bp, Homo sapiens
aaaactatttattttacgtcaacctatctagcc

SEQ ID NO: 34247 - DNA, 33 bp, Homo sapiens
tacctcattttattccaatttcatcaggtgtga

SEQ ID NO: 34248 - DNA, 33 bp, Homo sapiens
gtttcccattttccccaataaagatttacaaat

SEQ ID NO: 34249 - DNA, 33 bp, Homo sapiens
agtgaagctacagaaaagataattttggggttt

SEQ ID NO: 34250 - DNA, 33 bp, Homo sapiens
ttaggatgatgttgaacacattgaaatggagta

SEQ ID NO: 34251 - DNA, 33 bp, Homo sapiens
tttaaacctagtgagaacaaatcatcagctatg

SEQ ID NO: 34252 - DNA, 33 bp, Homo sapiens
ttgtatgagggaaaggaaatatgatctagctgc

SEQ ID NO: 34253 - DNA, 33 bp, Homo sapiens
taacaagttggactgaacacattgtatctcagg

SEQ ID NO: 34254 - DNA, 33 bp, Homo sapiens
ataatggaataaaagaatagagatggagaagat

SEQ ID NO: 34255 - DNA, 33 bp, Homo sapiens
aataagtagtcaaaatgagtagagtagatttgg

SEQ ID NO: 34256 - DNA, 33 bp, Homo sapiens
gaaggctatgaaaacaagtaaagaagagcctac

SEQ ID NO: 34257 - DNA, 33 bp, Homo sapiens
atgcttatagaagagcaatgacaagcaaaattt

SEQ ID NO: 34258 - DNA, 33 bp, Homo sapiens
agaatagcaactggtaataataggcaaaattca

SEQ ID NO: 34259 - DNA, 51 bp, Homo sapiens
gctttaaaaatacatttttaaataaagacaaatgtgatataaatcaatttt

SEQ ID NO: 34260 - DNA, 33 bp, Homo sapiens
ggaagtcttcatggaacgttatccaagttgctt

SEQ ID NO: 34261 - DNA, 51 bp, Homo sapiens
agcgaagaatcacagagaaacaatcctaaactgctgaaatttcctctccca

SEQ ID NO: 34262 - DNA, 33 bp, Homo sapiens
ctgaaagaattacacaacaatatgtaaaggtag

SEQ ID NO: 34263 - DNA, 33 bp, Homo sapiens
cctctgcttatgtttcactcgcaccagctgggc

SEQ ID NO: 34264 - DNA, 33 bp, Homo sapiens
tgttcctttggccacactgtgatttacagttta

SEQ ID NO: 34265 - DNA, 33 bp, Homo sapiens
catttataaatccaccaagcaaacatatgaggc

SEQ ID NO: 34266 - DNA, 33 bp, Homo sapiens
ttacagcctcactgggaaatttgaccttactag

SEQ ID NO: 34267 - DNA, 51 bp, Homo sapiens
tcctattaccattacctgaactaagacctatattaatccttcaactattac

SEQ ID NO: 34268 - DNA, 33 bp, Homo sapiens
tatatgaacagttgaaaatttgtggattgttct

SEQ ID NO: 34269 - DNA, 33 bp, Homo sapiens
tatggttcctgggcaaacctgagatggagattt

SEQ ID NO: 34270 - DNA, 33 bp, Homo sapiens
aaactgaactatgatgcaactacaacagatgct

SEQ ID NO: 34271 - DNA, 33 bp, Homo sapiens
agtcataaaaagggtacactgctgagactgcgt

SEQ ID NO: 34272 - DNA, 33 bp, Homo sapiens
ctttctcacactttacactccagcaattctgaa

SEQ ID NO: 34273 - DNA, 33 bp, Homo sapiens
tatctttttctttatcaaactgtcatgttgccc

SEQ ID NO: 34274 - DNA, 33 bp, Homo sapiens
gtgggaatgctaatcacatctgtgtatcaacac

SEQ ID NO: 34275 - DNA, 33 bp, Homo sapiens
tgtacaatagagttctaaaacttactcctgcta

SEQ ID NO: 34276 - DNA, 33 bp, Homo sapiens
gagtataataaactaaaatctcagtggtgatca

SEQ ID NO: 34277 - DNA, 33 bp, Homo sapiens
aagcagcaggaagcacaagatcattatccattt

SEQ ID NO: 34278 - DNA, 33 bp, Homo sapiens
gtgagttgatacccaactgaagagaagaaagga

SEQ ID NO: 34279 - DNA, 33 bp, Homo sapiens
cctagaaaaagtcttacgtactatctgaaagct

SEQ ID NO: 34280 - DNA, 33 bp, Homo sapiens
cacactaaatctccatcaccacatgtgcataca

SEQ ID NO: 34281 - DNA, 33 bp, Homo sapiens
ccctgcgagtccctaggaagctgcctagtcttt

SEQ ID NO: 34282 - DNA, 33 bp, Homo sapiens
catggtacctcaaccaatagttaaccttccata

SEQ ID NO: 34283 - DNA, 33 bp, Homo sapiens
taacattgatgtttcaaaaatttctattttacc

SEQ ID NO: 34284 - DNA, 33 bp, Homo sapiens
tattgaaattaatgaacagcactgaggcccaat

SEQ ID NO: 34285 - DNA, 33 bp, Homo sapiens
tccttggtgctgctcaagaatgcgttttattat

SEQ ID NO: 34286 - DNA, 51 bp, Homo sapiens
ttatcatcacaaacataaccatcacagaaattagattttgctgtttcaggt

SEQ ID NO: 34287 - DNA, 51 bp, Homo sapiens
cttccttagatgttcatggccggcaccttaagaatcctaagacctcaactc

SEQ ID NO: 34288 - DNA, 33 bp, Homo sapiens
tcatgatgaaatatacactttctttgctgcccg

SEQ ID NO: 34289 - DNA, 33 bp, Homo sapiens
ctgtgtgttcacaaaacaagcttggatggaaaa

SEQ ID NO: 34290 - DNA, 51 bp, Homo sapiens
agtagaaatgaatgtgcactaatgaactttattttctacacagttgcacta

SEQ ID NO: 34291 - DNA, 51 bp, Homo sapiens
ctctcttagaaggctcctaggaagacgtatgactacccaggtaactcagtc

SEQ ID NO: 34292 - DNA, 33 bp, Homo sapiens
taaaacaatctttctccaatcaacgaaaaggaa

SEQ ID NO: 34293 - DNA, 33 bp, Homo sapiens
atttattgtcctagaaagatgtgttcttaaaga

SEQ ID NO: 34294 - DNA, 51 bp, Homo sapiens
atcaggaataccaaagaattaatctgaactaatgtgattttgtttggggat

SEQ ID NO: 34295 - DNA, 33 bp, Homo sapiens
gagaaagaaataaaagacatcaagctatctttc

SEQ ID NO: 34296 - DNA, 33 bp, Homo sapiens
gatattaaccccatgaagtatatgtttcacaaa

SEQ ID NO: 34297 - DNA, 33 bp, Homo sapiens
ttgtagactccaataactgtacttgctttttga

SEQ ID NO: 34298 - DNA, 51 bp, Homo sapiens
tttcttataacatggtctatactcaagccaacaactttcatgcacaatcac

SEQ ID NO: 34299 - DNA, 51 bp, Homo sapiens
gctgaactccagtcatgaaccgtcacctagctaatatctatcttctgtgag

SEQ ID NO: 34300 - DNA, 33 bp, Homo sapiens
tggggaatgctttaaaaactgagacaggcagtt

SEQ ID NO: 34301 - DNA, 51 bp, Homo sapiens
cattctttcatttattcaaattgatgaatgcgattatatggaaattaaaaa

SEQ ID NO: 34302 - DNA, 33 bp, Homo sapiens
agccttgagaaggaaacagacatggagcaaatc

SEQ ID NO: 34303 - DNA, 33 bp, Homo sapiens
gtataaaaatgcacaccccttgaaagtaccact

SEQ ID NO: 34304 - DNA, 33 bp, Homo sapiens
catatagaaatagagacggaatgaggagatgga

SEQ ID NO: 34305 - DNA, 33 bp, Homo sapiens
acccaagggcacaagcactagaaatcagtggtg

SEQ ID NO: 34306 - DNA, 33 bp, Homo sapiens
ctagaaacaccagtagacaccgacagaaaatag

SEQ ID NO: 34307 - DNA, 33 bp, Homo sapiens
tgctcctgtggaccaacaagtaagaaaagtctc

SEQ ID NO: 34308 - DNA, 51 bp, Homo sapiens
gtactaaacgggaggaccaacacagataagtgcttcccaacccttccagac

SEQ ID NO: 34309 - DNA, 33 bp, Homo sapiens
tttcttgtattctaaaagaggttatgcattgtt

SEQ ID NO: 34310 - DNA, 33 bp, Homo sapiens
atttaaagacatactaacatgaaccacataatg

SEQ ID NO: 34311 - DNA, 33 bp, Homo sapiens
aacatactaacagggacggtttaaaagatgaga

SEQ ID NO: 34312 - DNA, 51 bp, Homo sapiens
tactctggtcattttcttctttatcactgttccaagaccaccaggcaatta

SEQ ID NO: 34313 - DNA, 33 bp, Homo sapiens
tttctcatttcacaaaaaacataaaggccaaag

SEQ ID NO: 34314 - DNA, 33 bp, Homo sapiens
taaaaggaatgctagaaaacatgtactaatatt

SEQ ID NO: 34315 - DNA, 33 bp, Homo sapiens
tcttcagtggctaaagaatccatgactttctga

SEQ ID NO: 34316 - DNA, 33 bp, Homo sapiens
gaaatgattcgctgccgcttagaggtttagagc

SEQ ID NO: 34317 - DNA, 33 bp, Homo sapiens
acctagcgtataattcaattcacgcaaagtgaa

SEQ ID NO: 34318 - DNA, 33 bp, Homo sapiens
tttttctgaatctaacaaagggtcttactttct

SEQ ID NO: 34319 - DNA, 33 bp, Homo sapiens
gcagatggcgagaaagaaagggtaggacacagg

SEQ ID NO: 34320 - DNA, 33 bp, Homo sapiens
ttgatcaaaatttgcaacactcatgtgggtcct

SEQ ID NO: 34321 - DNA, 33 bp, Homo sapiens
ttgggaaagagagcaaatcaggaaattcaacat

SEQ ID NO: 34322 - DNA, 33 bp, Homo sapiens
actctgccaaccgaaaacagcagagtttcagca

SEQ ID NO: 34323 - DNA, 33 bp, Homo sapiens
tcatattctatgacacagaacttaaaggtctca

SEQ ID NO: 34324 - DNA, 33 bp, Homo sapiens
tccacatttgggttagaattatagaaggcccac

SEQ ID NO: 34325 - DNA, 33 bp, Homo sapiens
tgtttaaaagccaagaagttgttatagttttaa

SEQ ID NO: 34326 - DNA, 33 bp, Homo sapiens
tccttcctatgaggaaagtcacatatttgtggg

SEQ ID NO: 34327 - DNA, 33 bp, Homo sapiens
acatctgaaggttaaccatgtggcaatttgtac

SEQ ID NO: 34328 - DNA, 33 bp, Homo sapiens
tgcaacctagagtaaactgagcccatagtctat

SEQ ID NO: 34329 - DNA, 33 bp, Homo sapiens
agaacaaattacatggacattcaactctcattg

SEQ ID NO: 34330 - DNA, 33 bp, Homo sapiens
cagctgcccctttggagaataggcttttattac

SEQ ID NO: 34331 - DNA, 33 bp, Homo sapiens
tgtgattcatgagtcaagtagcatctcatctaa

SEQ ID NO: 34332 - DNA, 33 bp, Homo sapiens
catcactgtcgggatgaacccctgcacgccctc

SEQ ID NO: 34333 - DNA, 33 bp, Homo sapiens
atacaaagtcatttgacggatgtgacactgggc

SEQ ID NO: 34334 - DNA, 33 bp, Homo sapiens
tatttaacttctacacagtatccctttatgatg

SEQ ID NO: 34335 - DNA, 33 bp, Homo sapiens
ggggctttctaaacaacgtaacccagtgcataa

SEQ ID NO: 34336 - DNA, 33 bp, Homo sapiens
gacagttaatacagataagtccctcagcctccc

SEQ ID NO: 34337 - DNA, 33 bp, Homo sapiens
ccccgtgccccacgggcagaatcccagagagga

SEQ ID NO: 34338 - DNA, 33 bp, Homo sapiens
aaaacagtcgaagccaatgaaatcagacttgct

SEQ ID NO: 34339 - DNA, 33 bp, Homo sapiens
gggctatgacttagtgcaagaggcaactcagga

SEQ ID NO: 34340 - DNA, 33 bp, Homo sapiens
acagtaaaacacagacaagtttcaaaagaaaac

SEQ ID NO: 34341 - DNA, 33 bp, Homo sapiens
ccaatgcatgaattaactattcagcggagagtc

SEQ ID NO: 34342 - DNA, 33 bp, Homo sapiens
aaatatatttgcagaacactatgctgtttctca

SEQ ID NO: 34343 - DNA, 33 bp, Homo sapiens
gctacttgtcagaggacactgaattgaagagag

SEQ ID NO: 34344 - DNA, 33 bp, Homo sapiens
tatcagaatccattcaactagcatttttggaac

SEQ ID NO: 34345 - DNA, 33 bp, Homo sapiens
ttttgttattaaaaaaagttttgtgtatggctt

SEQ ID NO: 34346 - DNA, 33 bp, Homo sapiens
aaaacactggcaataacgaggcctacctgttat

SEQ ID NO: 34347 - DNA, 33 bp, Homo sapiens
tatctaccaccatgcaactgttaagcagggagg

SEQ ID NO: 34348 - DNA, 51 bp, Homo sapiens
tatataaacaactctcttcttaggaatattcatttttcatcagtttaacta

SEQ ID NO: 34349 - DNA, 33 bp, Homo sapiens
atctcagcaggaccacggtgctttttctggact

SEQ ID NO: 34350 - DNA, 33 bp, Homo sapiens
gactgtcctattaatacggcaaatgtagtctct

SEQ ID NO: 34351 - DNA, 33 bp, Homo sapiens
aatttgcactttagaaaaatctggagaattgaa

SEQ ID NO: 34352 - DNA, 33 bp, Homo sapiens
ttagcaaccttaatcacattgctactgttccct

SEQ ID NO: 34353 - DNA, 33 bp, Homo sapiens
gctatgtcaaatataccagcatgggagttagga

SEQ ID NO: 34354 - DNA, 33 bp, Homo sapiens
aagatttcttacataacgttgcaggatcatctt

SEQ ID NO: 34355 - DNA, 51 bp, Homo sapiens
caaaagaactgcagatgtagtctcccaactgtatagcacattgctttctat

SEQ ID NO: 34356 - DNA, 33 bp, Homo sapiens
ctcttcattctcattaccttttggcatatacag

SEQ ID NO: 34357 - DNA, 33 bp, Homo sapiens
tcccactggactataaactccacgagggaagaa

SEQ ID NO: 34358 - DNA, 51 bp, Homo sapiens
atgaaaattccttcttggtggctagaaagtttgaaaatttctgaatttatt

SEQ ID NO: 34359 - DNA, 33 bp, Homo sapiens
tggatgaatacttttcacagtcagaaatcacta

SEQ ID NO: 34360 - DNA, 51 bp, Homo sapiens
aagctaaatagtaggtaaccactcaataatctggacccaggctccctgttt

SEQ ID NO: 34361 - DNA, 33 bp, Homo sapiens
tgtatatacatccacacattgtgcggtatcagc

SEQ ID NO: 34362 - DNA, 33 bp, Homo sapiens
aggattctggtcttctaacaactggttggatat

SEQ ID NO: 34363 - DNA, 33 bp, Homo sapiens
tggttcacccatctgtaaaaggagagtaacagc

SEQ ID NO: 34364 - DNA, 33 bp, Homo sapiens
gtccaggaatccttccagcagctccgcttcgca

SEQ ID NO: 34365 - DNA, 33 bp, Homo sapiens
ttccagaacaaaagctcaactctttcgtgtggc

SEQ ID NO: 34366 - DNA, 33 bp, Homo sapiens
attgtaaggtgccacagccattaaatagcacct

SEQ ID NO: 34367 - DNA, 51 bp, Homo sapiens
ttccagataattctcaaaccacatgacaggtgttactgaatgctggcaggg

SEQ ID NO: 34368 - DNA, 33 bp, Homo sapiens
attaactgtcaaataacaaaatctatggatgaa

SEQ ID NO: 34369 - DNA, 33 bp, Homo sapiens
aaaactggggtaaatacgttcaggaattagacc

SEQ ID NO: 34370 - DNA, 33 bp, Homo sapiens
atttattgaatgaatacgaaggataaacacacg

SEQ ID NO: 34371 - DNA, 33 bp, Homo sapiens
tctgaacattcttcccagattttgaacagttgt

SEQ ID NO: 34372 - DNA, 33 bp, Homo sapiens
gtgaagaggcacttacactacagttgcagcaat

SEQ ID NO: 34373 - DNA, 33 bp, Homo sapiens
agaaactattctgatacggcttattttccagtg

SEQ ID NO: 34374 - DNA, 51 bp, Homo sapiens
aagactcgaagaagatttccttttgcagtggctgatcaaacatcttccact

SEQ ID NO: 34375 - DNA, 33 bp, Homo sapiens
gagggaaaagttgaaacacacactgaactaaag

SEQ ID NO: 34376 - DNA, 51 bp, Homo sapiens
acatgatcaaaagcaatataatggaactagaaatcttttgaacaaatagtg

SEQ ID NO: 34377 - DNA, 51 bp, Homo sapiens
taagacataaatgtaaccagatctacagttaaatgatccctctaacaacag

SEQ ID NO: 34378 - DNA, 33 bp, Homo sapiens
ggatgtctagtctttaccaggcactgtctttga

SEQ ID NO: 34379 - DNA, 51 bp, Homo sapiens
tagaatcaccaggtcttggaactgacgggaagttgagaaagatggcaacaa

SEQ ID NO: 34380 - DNA, 33 bp, Homo sapiens
tatcatttttcagatacgtgactcaagttacca

SEQ ID NO: 34381 - DNA, 33 bp, Homo sapiens
tgagcctgaacctcaacataattaaaaccacag

SEQ ID NO: 34382 - DNA, 33 bp, Homo sapiens
ctgtatgtaaactgataagcctcatgcagacgc

SEQ ID NO: 34383 - DNA, 33 bp, Homo sapiens
aggaggaattcgccctcaacttgcttgccgcct

SEQ ID NO: 34384 - DNA, 51 bp, Homo sapiens
tctagaagttcaatgaacctcagcacagaataaacacaatgaaatccatac

SEQ ID NO: 34385 - DNA, 33 bp, Homo sapiens
ctctcttttctctccacatataacttccctatg

SEQ ID NO: 34386 - DNA, 33 bp, Homo sapiens
gaatgaatgataaatgaatgtgtaactgagcca

SEQ ID NO: 34387 - DNA, 33 bp, Homo sapiens
gaaataaaagttgagcagaacaagtaaacactc

SEQ ID NO: 34388 - DNA, 33 bp, Homo sapiens
taattgatcactcaccaattttaatatagtggc

SEQ ID NO: 34389 - DNA, 33 bp, Homo sapiens
agcaggttcctaacacactatgatatttaacag

SEQ ID NO: 34390 - DNA, 33 bp, Homo sapiens
caagctgaacaaaggcaaattattacacgatat

SEQ ID NO: 34391 - DNA, 33 bp, Homo sapiens
ttcttgtccaggtgccgcagctaagttaggtac

SEQ ID NO: 34392 - DNA, 33 bp, Homo sapiens
ctgcttgggagtttgaacatggcaactcaagag

SEQ ID NO: 34393 - DNA, 33 bp, Homo sapiens
gaagatgttgactaatcaaatacactgtcattt

SEQ ID NO: 34394 - DNA, 33 bp, Homo sapiens
cccaggttttatgcaggatctttatttgaaggt

SEQ ID NO: 34395 - DNA, 33 bp, Homo sapiens
acattgtacaactccacaggctccttacacaga

SEQ ID NO: 34396 - DNA, 33 bp, Homo sapiens
taggggaagaaaggtccagtagaaggtggtaac

SEQ ID NO: 34397 - DNA, 33 bp, Homo sapiens
taaggatagattcctgaaacagatccttctttc

SEQ ID NO: 34398 - DNA, 51 bp, Homo sapiens
acaaatacttttttaattcaagtaacgtacactgcaactggatacgttctt

SEQ ID NO: 34399 - DNA, 33 bp, Homo sapiens
agataaaaacattccaaactcaaaaccacagca

SEQ ID NO: 34400 - DNA, 51 bp, Homo sapiens
gtaagatcatgtaactactttgcttaaaatcctctcccagtttcccatctc

SEQ ID NO: 34401 - DNA, 33 bp, Homo sapiens
ccctacccacactgtacgaccagctccgcagta

SEQ ID NO: 34402 - DNA, 33 bp, Homo sapiens
gttcttacaatgatccgagggccctacataatc

SEQ ID NO: 34403 - DNA, 33 bp, Homo sapiens
gagttgttgaagaaaaaagactggatttcaggt

SEQ ID NO: 34404 - DNA, 33 bp, Homo sapiens
ttaattccttgcaagaagattgtctcaaatgat

SEQ ID NO: 34405 - DNA, 33 bp, Homo sapiens
ggcttgaaggaaaggaagtttagcaggaaccag

SEQ ID NO: 34406 - DNA, 33 bp, Homo sapiens
aatgaacctgagagtcaccacttaagatactgt

SEQ ID NO: 34407 - DNA, 33 bp, Homo sapiens
actttgttctggcctacagtaaagcgcctttca

SEQ ID NO: 34408 - DNA, 51 bp, Homo sapiens
tagaataaatagaattatacctctacgtgttataagcctcttaacagccac

SEQ ID NO: 34409 - DNA, 33 bp, Homo sapiens
acgactctgggacttacgttgtgcagatttagt

SEQ ID NO: 34410 - DNA, 33 bp, Homo sapiens
gtgttacatctagaaaagctttgcctaacccaa

SEQ ID NO: 34411 - DNA, 33 bp, Homo sapiens
atacaatggtctgagacgaagtttgttgggttt

SEQ ID NO: 34412 - DNA, 33 bp, Homo sapiens
aagagctttaaaggcaaggttgagctatacaag

SEQ ID NO: 34413 - DNA, 33 bp, Homo sapiens
ggcaaaagtcacctcacagtttatgtagcccag

SEQ ID NO: 34414 - DNA, 51 bp, Homo sapiens
atcctacccatatgacttagctagaaataaattttaaattaaagtatcatt

SEQ ID NO: 34415 - DNA, 33 bp, Homo sapiens
caaaacaaaagatggcaacgtactttgagtagc

SEQ ID NO: 34416 - DNA, 33 bp, Homo sapiens
atcgtgagaacagcaccaaaggggcaaattcac

SEQ ID NO: 34417 - DNA, 33 bp, Homo sapiens
aagatccagtactgaccgaagattttctacaac

SEQ ID NO: 34418 - DNA, 33 bp, Homo sapiens
aatagattactgcttgaaaagtgcttaatatat

SEQ ID NO: 34419 - DNA, 33 bp, Homo sapiens
tctccgtcagaattcccctgcagttgtttgtgg

SEQ ID NO: 34420 - DNA, 33 bp, Homo sapiens
gggcaaaaatcacgtacgtaagtttgggcttat

SEQ ID NO: 34421 - DNA, 33 bp, Homo sapiens
tagtgctctagtcccacgtaacaaatcttaaaa

SEQ ID NO: 34422 - DNA, 33 bp, Homo sapiens
ggctagttatcccagcaaatagcgagtcctgtc

SEQ ID NO: 34423 - DNA, 33 bp, Homo sapiens
tagttgttaccctcaaaaagctactgttacctc

SEQ ID NO: 34424 - DNA, 51 bp, Homo sapiens
ttcctttgacaacatgttttgtaccaagctttttagtgcccttcttttaaa

SEQ ID NO: 34425 - DNA, 33 bp, Homo sapiens
ggtcataacaacaaacactaactcatcacacac

SEQ ID NO: 34426 - DNA, 33 bp, Homo sapiens
aaggccagatcagatacgtgcaccgatccacaa

SEQ ID NO: 34427 - DNA, 33 bp, Homo sapiens
ttattgtcacaaattaacagtatttttgcagtg

SEQ ID NO: 34428 - DNA, 33 bp, Homo sapiens
gcctccatctactttagagtgaacaggcttgta

SEQ ID NO: 34429 - DNA, 33 bp, Homo sapiens
cttgctctataatctaacatactgtatgtccta

SEQ ID NO: 34430 - DNA, 33 bp, Homo sapiens
gatttgttttactcaaatgcactgaaaattctg

SEQ ID NO: 34431 - DNA, 33 bp, Homo sapiens
acttctcaaacaaaaccgattgtcactttcaac

SEQ ID NO: 34432 - DNA, 33 bp, Homo sapiens
catggctggtggcgcaagaaactttcaatcatg

SEQ ID NO: 34433 - DNA, 33 bp, Homo sapiens
ggcggtcggtattcaaagaatctgctctgatta

SEQ ID NO: 34434 - DNA, 33 bp, Homo sapiens
tgccagatatatgagcagccctatcacagttcc

SEQ ID NO: 34435 - DNA, 33 bp, Homo sapiens
catctctacaaatatgaaaacaaaaatagcagg

SEQ ID NO: 34436 - DNA, 33 bp, Homo sapiens
gggggacaggacagaaaactgtgcgactgtgac

SEQ ID NO: 34437 - DNA, 33 bp, Homo sapiens
tgtagcttcatatttaactctcactgtatgccc

SEQ ID NO: 34438 - DNA, 33 bp, Homo sapiens
cctaccccatcactcacggcagaaactaaggcc

SEQ ID NO: 34439 - DNA, 33 bp, Homo sapiens
gtgtcaccataacttacacatgaagaacactcc

SEQ ID NO: 34440 - DNA, 33 bp, Homo sapiens
ccaaggtgcagaaccacccacattacttgtaga

SEQ ID NO: 34441 - DNA, 33 bp, Homo sapiens
cacagcaacatgtacaagttaccaagtcattgt

SEQ ID NO: 34442 - DNA, 33 bp, Homo sapiens
gcaaaacctgaaactccatgtaggaagctatgt

SEQ ID NO: 34443 - DNA, 33 bp, Homo sapiens
caacacttttaaaggcaatgtcttgttgggtcc

SEQ ID NO: 34444 - DNA, 51 bp, Homo sapiens
tacacctaggtgtttgctatgtcgaataattcattgtatggcaaattcatc

SEQ ID NO: 34445 - DNA, 33 bp, Homo sapiens
tactagtgagtttccacgaaaaatctcttttat

SEQ ID NO: 34446 - DNA, 33 bp, Homo sapiens
acacatgattttgtggaataactggcctatgtt

SEQ ID NO: 34447 - DNA, 33 bp, Homo sapiens
tttgacatcttctaccaagcttgcagaatatct

SEQ ID NO: 34448 - DNA, 33 bp, Homo sapiens
tgcctacacatagacaataaacaaatgtgtggt

SEQ ID NO: 34449 - DNA, 33 bp, Homo sapiens
tcaaacactcaccattaaaaacctcattaaatt

SEQ ID NO: 34450 - DNA, 33 bp, Homo sapiens
gagttgaaaaagcggaatacgcaagaataactt

SEQ ID NO: 34451 - DNA, 33 bp, Homo sapiens
ctcctggttgttcaagactgttgttttgttgac

SEQ ID NO: 34452 - DNA, 51 bp, Homo sapiens
cagaggaagctctccatgtaacacaaagtgcagtgaggagtgagaaccaca

SEQ ID NO: 34453 - DNA, 33 bp, Homo sapiens
ttttgcccagatattcaaatgttatcttaataa

SEQ ID NO: 34454 - DNA, 33 bp, Homo sapiens
gaaaacagtgaactcaaggatactaattcccgg

SEQ ID NO: 34455 - DNA, 33 bp, Homo sapiens
aatttactttcttatcaacagtgtgacatggct

SEQ ID NO: 34456 - DNA, 33 bp, Homo sapiens
aatgcagaagcttaataatcaaaaccagggaat

SEQ ID NO: 34457 - DNA, 33 bp, Homo sapiens
gaaaagcttgtatttcacactgatccttaagat

SEQ ID NO: 34458 - DNA, 33 bp, Homo sapiens
tcttgcaaattcagcacagtgagttctctacaa

SEQ ID NO: 34459 - DNA, 33 bp, Homo sapiens
ctgtaatcagaaataaggcaaaaatgtctgcac

SEQ ID NO: 34460 - DNA, 33 bp, Homo sapiens
cctccattccttcgacaccaccattttaaaggg

SEQ ID NO: 34461 - DNA, 33 bp, Homo sapiens
ttcttttgctggcactaacttaatcacctcaat

SEQ ID NO: 34462 - DNA, 33 bp, Homo sapiens
atcctaattgtaattaccacctgtctgtatcag

SEQ ID NO: 34463 - DNA, 33 bp, Homo sapiens
tgcaagtgccttattacgcatcagtaaaacagg

SEQ ID NO: 34464 - DNA, 33 bp, Homo sapiens
gcaggtaaggagcacacggttgaatctcagaga

SEQ ID NO: 34465 - DNA, 33 bp, Homo sapiens
agccacatgtgactaccgagtattggaaacagc

SEQ ID NO: 34466 - DNA, 33 bp, Homo sapiens
atcctttccctaaaccaaacagtctttctcagt

SEQ ID NO: 34467 - DNA, 33 bp, Homo sapiens
gaataattgctgagccactaaagaagaaaatac

SEQ ID NO: 34468 - DNA, 33 bp, Homo sapiens
gattggatgcatcctaaaactgatactgaccta

SEQ ID NO: 34469 - DNA, 33 bp, Homo sapiens
gtgaatcatttaaccactcaaaacatagctggt

SEQ ID NO: 34470 - DNA, 33 bp, Homo sapiens
tagataaaatcctgcgaataaatggttatattg

SEQ ID NO: 34471 - DNA, 33 bp, Homo sapiens
aatttgcttctggcaagaaatgtgcctaggtcc

SEQ ID NO: 34472 - DNA, 33 bp, Homo sapiens
atttcacaaagccttacctcagaaaagttcatc

SEQ ID NO: 34473 - DNA, 33 bp, Homo sapiens
ggtacctgaattcaaccgttcattcaactacaa

SEQ ID NO: 34474 - DNA, 33 bp, Homo sapiens
caagatgaggacactgcagataggaagtaatgc

SEQ ID NO: 34475 - DNA, 33 bp, Homo sapiens
acagtttgccagtgaacgagttaccatgaggga

SEQ ID NO: 34476 - DNA, 33 bp, Homo sapiens
tgtgaaaacatggagaagtgttcagggatggag

SEQ ID NO: 34477 - DNA, 33 bp, Homo sapiens
ttaatacagaaacataaaatcaagtactgcata

SEQ ID NO: 34478 - DNA, 33 bp, Homo sapiens
ttctactgacttcctaagtttttagacaaagtt

SEQ ID NO: 34479 - DNA, 33 bp, Homo sapiens
aatgggaaagggaaaaatcatcaagcttctctc

SEQ ID NO: 34480 - DNA, 33 bp, Homo sapiens
ttactaaatacagcaacgttctggcagcttcag

SEQ ID NO: 34481 - DNA, 33 bp, Homo sapiens
gcagttgttcttccaactggaggccagagtgtg

SEQ ID NO: 34482 - DNA, 33 bp, Homo sapiens
tttaggcaaatagagggaaagcagagaactttc

SEQ ID NO: 34483 - DNA, 33 bp, Homo sapiens
ctaccttacccacaaagataggccctccttatc

SEQ ID NO: 34484 - DNA, 33 bp, Homo sapiens
gacgtaccatctcctaacacactggtgtcaggg

SEQ ID NO: 34485 - DNA, 33 bp, Homo sapiens
tgatagtttgggaaataagaatcaagctgtaac

SEQ ID NO: 34486 - DNA, 33 bp, Homo sapiens
atgcagtaatttaccaacacgaaaatgtgacca

SEQ ID NO: 34487 - DNA, 33 bp, Homo sapiens
tggtggagcagacgcaaagaccaaatgacttaa

SEQ ID NO: 34488 - DNA, 33 bp, Homo sapiens
atgggtcagaaatacaccataaatttgttggat

SEQ ID NO: 34489 - DNA, 33 bp, Homo sapiens
taaatgtgctttcaacgagcaaatcatttccaa

SEQ ID NO: 34490 - DNA, 33 bp, Homo sapiens
atgttgcaagaagcttgaaagtggttatgaatt

SEQ ID NO: 34491 - DNA, 33 bp, Homo sapiens
acattgaatatgggacacaaatgttctatttaa

SEQ ID NO: 34492 - DNA, 33 bp, Homo sapiens
gaggaaagcgagattacactaaggttttgttaa

SEQ ID NO: 34493 - DNA, 33 bp, Homo sapiens
ttattcattatatagactccctcagcctctttc

SEQ ID NO: 34494 - DNA, 33 bp, Homo sapiens
tgtatttgtggactcactcgggctataaagtga

SEQ ID NO: 34495 - DNA, 33 bp, Homo sapiens
tgcaaatatgtaaacaaggacacctttacctga

SEQ ID NO: 34496 - DNA, 33 bp, Homo sapiens
tgtgaatgcaaaaccactgatgaaatgtggtac

SEQ ID NO: 34497 - DNA, 51 bp, Homo sapiens
gttcaatgaaaataatcaccaagtaagataatgaagtaaaacactgcttac

SEQ ID NO: 34498 - DNA, 51 bp, Homo sapiens
atgatgtctgatacatagtttggtgccaatttttgtgatacttatatcctt

SEQ ID NO: 34499 - DNA, 33 bp, Homo sapiens
cctcctccaacacacacggatggcatgagattt

SEQ ID NO: 34500 - DNA, 33 bp, Homo sapiens
atcatattagagactacctttacaggacttgat

SEQ ID NO: 34501 - DNA, 33 bp, Homo sapiens
tgtcatttttgaagaaggcaacctttaaccctt

SEQ ID NO: 34502 - DNA, 33 bp, Homo sapiens
aaccagtttctccagcaaggtaggaatggaaat

SEQ ID NO: 34503 - DNA, 33 bp, Homo sapiens
tttactgtcgctagtaagcagttaatcaacaat

SEQ ID NO: 34504 - DNA, 33 bp, Homo sapiens
gcataagcaattaatgaatattttgtaggctac

SEQ ID NO: 34505 - DNA, 33 bp, Homo sapiens
agtatggtgttcataccgcagggcaatctgatc

SEQ ID NO: 34506 - DNA, 51 bp, Homo sapiens
ttgcttggtaaatgaagttgaataagataacacatagaagacatttaacaa

SEQ ID NO: 34507 - DNA, 33 bp, Homo sapiens
gtccctgttggagacaaatacatggttcccaga

SEQ ID NO: 34508 - DNA, 33 bp, Homo sapiens
aggctaaacactgttaaaaggacatgatcatga

SEQ ID NO: 34509 - DNA, 33 bp, Homo sapiens
gaaagatgtaccactgcagtataatagagagtg

SEQ ID NO: 34510 - DNA, 33 bp, Homo sapiens
ttcttaacattatgcaacatataggccaaatgg

SEQ ID NO: 34511 - DNA, 33 bp, Homo sapiens
tgttttctctgtcagaccaatttgtttttctta

SEQ ID NO: 34512 - DNA, 33 bp, Homo sapiens
tggaagttctcattgccctctccatatcccgga

SEQ ID NO: 34513 - DNA, 33 bp, Homo sapiens
tgtagcttcaaagttacagcccctctctgggtg

SEQ ID NO: 34514 - DNA, 33 bp, Homo sapiens
ctgctgcttagttgcaatccgatatgcctccct

SEQ ID NO: 34515 - DNA, 33 bp, Homo sapiens
aagataaaacagatacagattctgcctacctgc

SEQ ID NO: 34516 - DNA, 33 bp, Homo sapiens
caggtgaattcagggaccaaagctgttttgtgt

SEQ ID NO: 34517 - DNA, 33 bp, Homo sapiens
gcgacaacgacaaggacaaggcctggacaaagc

SEQ ID NO: 34518 - DNA, 33 bp, Homo sapiens
tcctatgccatctaaacttgctggaaagaggtc

SEQ ID NO: 34519 - DNA, 33 bp, Homo sapiens
tgacctcctaagggaaataagtcctgcagaagt

SEQ ID NO: 34520 - DNA, 33 bp, Homo sapiens
tacatttgaaatgtgacggctttgccaaatgag

SEQ ID NO: 34521 - DNA, 33 bp, Homo sapiens
ggcatgggccaatcaaaagaattttggcttacc

SEQ ID NO: 34522 - DNA, 33 bp, Homo sapiens
taaagtggacaatcaactgacgttagctgtagt

SEQ ID NO: 34523 - DNA, 33 bp, Homo sapiens
ttccttgcaaaattaacagacaggcttaaagag

SEQ ID NO: 34524 - DNA, 33 bp, Homo sapiens
atcatttccttttcagaagtctacaggtaaaaa

SEQ ID NO: 34525 - DNA, 33 bp, Homo sapiens
ctgtctcaagaaaaaaaaagtgactcaccaagt

SEQ ID NO: 34526 - DNA, 33 bp, Homo sapiens
cctcaataaccaggtacagagtgagcacaacaa

SEQ ID NO: 34527 - DNA, 33 bp, Homo sapiens
ctgaaaatagcaagtacgggtaacaacgtggag

SEQ ID NO: 34528 - DNA, 33 bp, Homo sapiens
cagtctgcaagactcgcccagtgcagactttgc

SEQ ID NO: 34529 - DNA, 33 bp, Homo sapiens
tttctatgtggacatccgatatatttgtcccta

SEQ ID NO: 34530 - DNA, 33 bp, Homo sapiens
attccgtgatcctgaacactgccacccatcagt

SEQ ID NO: 34531 - DNA, 33 bp, Homo sapiens
ggcaaatctctagttaggtagtcatatcagcag

SEQ ID NO: 34532 - DNA, 33 bp, Homo sapiens
cctgaaacttgctgaacgttgaagtgaaggtca

SEQ ID NO: 34533 - DNA, 33 bp, Homo sapiens
tgaagcatcctccaagaagagatcaattaaaag

SEQ ID NO: 34534 - DNA, 33 bp, Homo sapiens
gcagcttgtttgagacactgaaatatgaatttt

SEQ ID NO: 34535 - DNA, 33 bp, Homo sapiens
ggtcccaattctgtaccgagctagctgacatta

SEQ ID NO: 34536 - DNA, 33 bp, Homo sapiens
gtacagcttgattcagcatatatccaacacctg

SEQ ID NO: 34537 - DNA, 33 bp, Homo sapiens
ctctctttgataactccgagccctaaaccagtg

SEQ ID NO: 34538 - DNA, 33 bp, Homo sapiens
agcagtcaccgagggaaccaacggaacaagaca

SEQ ID NO: 34539 - DNA, 33 bp, Homo sapiens
actctgggcccatttacagcctacagcaggtgc

SEQ ID NO: 34540 - DNA, 33 bp, Homo sapiens
tcttgtctgaaacataaataactcacagacaga

SEQ ID NO: 34541 - DNA, 33 bp, Homo sapiens
tgaccaaaaactagaacgtggtgcgtggctccc

SEQ ID NO: 34542 - DNA, 33 bp, Homo sapiens
actcaatatattattaagagagtggctcagttt

SEQ ID NO: 34543 - DNA, 33 bp, Homo sapiens
gttcctactacattcacaactggttaggtcttt

SEQ ID NO: 34544 - DNA, 33 bp, Homo sapiens
caggatcaaatgtccaatgaaattcaacccaat

SEQ ID NO: 34545 - DNA, 51 bp, Homo sapiens
tgaaagcacctctattccagccattatcattatccattatcattaatgatc

SEQ ID NO: 34546 - DNA, 33 bp, Homo sapiens
tcaggtattttatagcaaacttctatgtagaat

SEQ ID NO: 34547 - DNA, 33 bp, Homo sapiens
agatgcagtgaaggaacacgtttgaaatgctcc

SEQ ID NO: 34548 - DNA, 33 bp, Homo sapiens
aaagagattagaatccaaggaaattgtggtaca

SEQ ID NO: 34549 - DNA, 33 bp, Homo sapiens
atcactaagaaaaatccgtagactgtgagaata

SEQ ID NO: 34550 - DNA, 33 bp, Homo sapiens
gtagctacagtcacaaattaacaattatcaggg

SEQ ID NO: 34551 - DNA, 51 bp, Homo sapiens
caccaatacagataatataaacgcaaatgaaacaatcaggtcatctgtttc

SEQ ID NO: 34552 - DNA, 33 bp, Homo sapiens
accagtgtaactccaactgattaccccatcata

SEQ ID NO: 34553 - DNA, 51 bp, Homo sapiens
tagttattcaacatccatcaaataaaataatatcagaaatatgcataccac

SEQ ID NO: 34554 - DNA, 33 bp, Homo sapiens
attctcactgaaatgactatggaacagagggaa

SEQ ID NO: 34555 - DNA, 33 bp, Homo sapiens
gaaagatacaaagtacggattgtgcgtgtgtct

SEQ ID NO: 34556 - DNA, 33 bp, Homo sapiens
agttggtacacagcaaatgcttaatcagtgaat

SEQ ID NO: 34557 - DNA, 33 bp, Homo sapiens
ttcagagcctaaaataaagtggttgagtcaggg

SEQ ID NO: 34558 - DNA, 33 bp, Homo sapiens
ggtaaggagccaaatcaagctgtctctggtgga

SEQ ID NO: 34559 - DNA, 33 bp, Homo sapiens
ctgtgagttggaatggacacttctaaaaacaaa

SEQ ID NO: 34560 - DNA, 33 bp, Homo sapiens
gcacaggaagcctgtacatggatttctctagac

SEQ ID NO: 34561 - DNA, 33 bp, Homo sapiens
tttacaatcactataaggcaggaaaataccaaa

SEQ ID NO: 34562 - DNA, 33 bp, Homo sapiens
cgtgtctgcagaggcacgtgtaaagtgatgcta

SEQ ID NO: 34563 - DNA, 51 bp, Homo sapiens
attacaaacctatttggaaccagtgaaactcataggacccagaagaggcaa

SEQ ID NO: 34564 - DNA, 51 bp, Homo sapiens
tgttctggaagctctacttcaatggaacttatcctctgtaggaatcttgca

SEQ ID NO: 34565 - DNA, 33 bp, Homo sapiens
acaagactggtccaaagtaaagtgccgtcgtcc

SEQ ID NO: 34566 - DNA, 51 bp, Homo sapiens
tcctttctcttcattatttttgctacataaactctagtatctttttttttg

SEQ ID NO: 34567 - DNA, 51 bp, Homo sapiens
agatgtactcccaaaagctgtgtaaagcaaaaagaaagggaaggcaggatt

SEQ ID NO: 34568 - DNA, 33 bp, Homo sapiens
agatatgtcattgaaaataaatggaaaaggccg

SEQ ID NO: 34569 - DNA, 33 bp, Homo sapiens
atccccaccaggaacaatgacaatgccagttct

SEQ ID NO: 34570 - DNA, 51 bp, Homo sapiens
ggtggcaacaaagagtcatgatttacaatctcagatgcttggggttaatag

SEQ ID NO: 34571 - DNA, 33 bp, Homo sapiens
gatatataaaagaaacaagagtccaacaatccc

SEQ ID NO: 34572 - DNA, 33 bp, Homo sapiens
tataagaatgagaaaacggtttgctttgtttcc

SEQ ID NO: 34573 - DNA, 33 bp, Homo sapiens
agccccctgtgaataaaccattcccaagatctt

SEQ ID NO: 34574 - DNA, 33 bp, Homo sapiens
ttgagaaaaggatgaaaagcaaaagccttagat

SEQ ID NO: 34575 - DNA, 33 bp, Homo sapiens
taaaccttttgaatgcagagactatcttgtatg

SEQ ID NO: 34576 - DNA, 33 bp, Homo sapiens
gaaccaagaacacagccgaatcacagtacagga

SEQ ID NO: 34577 - DNA, 33 bp, Homo sapiens
gtgttggtgtattttacggatgctttctgtaga

SEQ ID NO: 34578 - DNA, 51 bp, Homo sapiens
cttaaaagtacacaccgacatgcgagatgttgctctgtcacttgctatgtg

SEQ ID NO: 34579 - DNA, 51 bp, Homo sapiens
aaatgccatttatttgccgttgaccactgggagacttacctgacgcagtgc

SEQ ID NO: 34580 - DNA, 33 bp, Homo sapiens
ttgctctcattttttacagttcttgtttgacga

SEQ ID NO: 34581 - DNA, 33 bp, Homo sapiens
cttgtccgactgccagacaagcaacgaggtctc

SEQ ID NO: 34582 - DNA, 33 bp, Homo sapiens
ggggctgggtcagtcactcaaggaagttgtcaa

SEQ ID NO: 34583 - DNA, 33 bp, Homo sapiens
aaatgattagcaaagacaggcatgtttccacac

SEQ ID NO: 34584 - DNA, 33 bp, Homo sapiens
tagcagagatgcattacaacagcaagagaaggg

SEQ ID NO: 34585 - DNA, 33 bp, Homo sapiens
agcctcaggagataaacggtccatgatatgaag

SEQ ID NO: 34586 - DNA, 51 bp, Homo sapiens
gaaatctaccatcattaccaagctcaatgaataaatgatatagatatggca

SEQ ID NO: 34587 - DNA, 33 bp, Homo sapiens
ccccaaattatgggaacagcagatacaaggagt

SEQ ID NO: 34588 - DNA, 33 bp, Homo sapiens
ttgaagtgataacctccaagtagatcacaaatc

SEQ ID NO: 34589 - DNA, 33 bp, Homo sapiens
tgcccaaaagccgtcaaagccttacacaaaaaa

SEQ ID NO: 34590 - DNA, 33 bp, Homo sapiens
tgttgataagtaagaaagttgtcagaatcaaaa

SEQ ID NO: 34591 - DNA, 33 bp, Homo sapiens
tccattgctgcaaccaacacctatattactttc

SEQ ID NO: 34592 - DNA, 33 bp, Homo sapiens
atgacaaaaattaaaaggatgctgatactagcc

SEQ ID NO: 34593 - DNA, 33 bp, Homo sapiens
tttaatagagagaccccgcaaatcattttcaat

SEQ ID NO: 34594 - DNA, 33 bp, Homo sapiens
ttcttagctgttgagacctatgcaagttgtttt

SEQ ID NO: 34595 - DNA, 33 bp, Homo sapiens
caaagcatgaaaagaccggaattcaaaatgaag

SEQ ID NO: 34596 - DNA, 33 bp, Homo sapiens
cagcactgcggggatcaatctgtttcacctagg

SEQ ID NO: 34597 - DNA, 51 bp, Homo sapiens
tggagcaagtccatgccatcagcagaagataatttaatgtcttttgaaaaa

SEQ ID NO: 34598 - DNA, 33 bp, Homo sapiens
aatgtgttggaaaggacgtggagaaattggagt

SEQ ID NO: 34599 - DNA, 33 bp, Homo sapiens
aggtgagaaatcgctcagaaattctcaaagccc

SEQ ID NO: 34600 - DNA, 33 bp, Homo sapiens
ttaaagtagacactaaagatggtgggttatcaa

SEQ ID NO: 34601 - DNA, 33 bp, Homo sapiens
cactcttgagttctgaagatgaacaaatgtaaa

SEQ ID NO: 34602 - DNA, 33 bp, Homo sapiens
ggaacattgtgtcttaaattcatgggcttgtac

SEQ ID NO: 34603 - DNA, 33 bp, Homo sapiens
tattttcaagaacggcaattttcagttaattta

SEQ ID NO: 34604 - DNA, 51 bp, Homo sapiens
gtacaaggcagctagttggtagtagactggaattccttttagaaagagctg

SEQ ID NO: 34605 - DNA, 51 bp, Homo sapiens
atcatcagatttaccctgcttgccagatagcatctagtcttcactcaggtt

SEQ ID NO: 34606 - DNA, 33 bp, Homo sapiens
aagtttactagagcaacattcttcaccaaacat

SEQ ID NO: 34607 - DNA, 33 bp, Homo sapiens
gttcttttctgttctccgaaagtgcctttttaa

SEQ ID NO: 34608 - DNA, 33 bp, Homo sapiens
atgcaattctaaaacccgaaggagacaggaccc

SEQ ID NO: 34609 - DNA, 33 bp, Homo sapiens
ctcagaagagagattcagaaatgggaggcagca

SEQ ID NO: 34610 - DNA, 33 bp, Homo sapiens
aaagtaagtgcaagaaattcactaataattcaa

SEQ ID NO: 34611 - DNA, 33 bp, Homo sapiens
gggcctgagcaaggataacttcatgagaagggt

SEQ ID NO: 34612 - DNA, 33 bp, Homo sapiens
acaagctgtttctttcccttaggcaggccagcc

SEQ ID NO: 34613 - DNA, 33 bp, Homo sapiens
taaagtcccaccttgaaaactggtcagtctccc

SEQ ID NO: 34614 - DNA, 33 bp, Homo sapiens
tcaagtttttagcttacgaaaatttgcacaagt

SEQ ID NO: 34615 - DNA, 51 bp, Homo sapiens
cacagccaaaccgtatcagtaataaaagaatgaaagtgggagggaatgatg

SEQ ID NO: 34616 - DNA, 33 bp, Homo sapiens
tatgggaaactctaagaacaaaggcccaggttt

SEQ ID NO: 34617 - DNA, 51 bp, Homo sapiens
agatgcttagaatctttgttatctacgtatgagggtcaattatatcttggg

SEQ ID NO: 34618 - DNA, 33 bp, Homo sapiens
atcaaatctgaatgtaaaagaaggtcaataaca

SEQ ID NO: 34619 - DNA, 33 bp, Homo sapiens
acacacgctactgtcacgtaattttctccttag

SEQ ID NO: 34620 - DNA, 33 bp, Homo sapiens
gaacaaaggtcctaaagagaaacaaatggaaag

SEQ ID NO: 34621 - DNA, 33 bp, Homo sapiens
ggatgtttctcactcacagaaaatgtgtagtgg

SEQ ID NO: 34622 - DNA, 33 bp, Homo sapiens
gtagatgataacatcaataacttgggacgtaag

SEQ ID NO: 34623 - DNA, 33 bp, Homo sapiens
ctctaagctttgggataaatggccctatcactc

SEQ ID NO: 34624 - DNA, 33 bp, Homo sapiens
ccctgtgtttacacggaaactggctcttctcag

SEQ ID NO: 34625 - DNA, 51 bp, Homo sapiens
agattaaaagaaataggcaatgggacagtaaactggaaaatatatttgaag

SEQ ID NO: 34626 - DNA, 33 bp, Homo sapiens
cctcctaacgcggcaaaaatgaatcactgacaa

SEQ ID NO: 34627 - DNA, 33 bp, Homo sapiens
gcacactgaggaataagagttttgtatccattg

SEQ ID NO: 34628 - DNA, 33 bp, Homo sapiens
gagaacttagcaaaaccgaagtgtgaattttca

SEQ ID NO: 34629 - DNA, 33 bp, Homo sapiens
ttctatctatcgatcaagtcactcatgcctagt

SEQ ID NO: 34630 - DNA, 33 bp, Homo sapiens
gaacatcctgagaactaaaaatacctctacaag

SEQ ID NO: 34631 - DNA, 33 bp, Homo sapiens
gcaacctcaaagtcagacagaagcgtgaatctc

SEQ ID NO: 34632 - DNA, 33 bp, Homo sapiens
gtattatccataatgcacagtagccagtaaaaa

SEQ ID NO: 34633 - DNA, 33 bp, Homo sapiens
ctggaaggaacaagcaatattctctgccctgta

SEQ ID NO: 34634 - DNA, 33 bp, Homo sapiens
cctcaggtcttagccaaatggagctcaccagag

SEQ ID NO: 34635 - DNA, 51 bp, Homo sapiens
tttgatttcctattttgtagcatcaattgtttcatttcctcttttatggac

SEQ ID NO: 34636 - DNA, 33 bp, Homo sapiens
ctggagcttggactgaaactttctcaagggtgt

SEQ ID NO: 34637 - DNA, 33 bp, Homo sapiens
aaacgtttcatgtatacaaggggttgagattat

SEQ ID NO: 34638 - DNA, 33 bp, Homo sapiens
taatttttccaactatcaaaccttgtaggtata

SEQ ID NO: 34639 - DNA, 33 bp, Homo sapiens
acaaaacacgctgttcaaagagcatcaagtgag

SEQ ID NO: 34640 - DNA, 33 bp, Homo sapiens
gaagtgagggggaaagaattgagtggtttgttt

SEQ ID NO: 34641 - DNA, 33 bp, Homo sapiens
acaaatattcctgagacctgggtactgaggtac

SEQ ID NO: 34642 - DNA, 33 bp, Homo sapiens
atgtccccagaaagaccgtctcaaaaacaaggg

SEQ ID NO: 34643 - DNA, 51 bp, Homo sapiens
aggataataccaagagtttggagtacgcgccttacccagtgttcccatgaa

SEQ ID NO: 34644 - DNA, 33 bp, Homo sapiens
gtgttctaaactctgacgactaatatttctgga

SEQ ID NO: 34645 - DNA, 33 bp, Homo sapiens
atatgagaagataacaaccctcattggtaatca

SEQ ID NO: 34646 - DNA, 33 bp, Homo sapiens
tccaggactgtaaaataatagcttgtcttgctc

SEQ ID NO: 34647 - DNA, 33 bp, Homo sapiens
gcaaacttttgatcacacacctaacaaaaactc

SEQ ID NO: 34648 - DNA, 33 bp, Homo sapiens
agcaacagttacctcgaataagatggccattcc

SEQ ID NO: 34649 - DNA, 33 bp, Homo sapiens
gctttgatactgacccgccctgaccttatcact

SEQ ID NO: 34650 - DNA, 33 bp, Homo sapiens
ttttcgtggtgttaaaatgaggctgcaacccct

SEQ ID NO: 34651 - DNA, 33 bp, Homo sapiens
ctccccctctctgatccaagttcattgtccctg

SEQ ID NO: 34652 - DNA, 33 bp, Homo sapiens
gaaaggaccaagtccgaattataaagcaacaag

SEQ ID NO: 34653 - DNA, 33 bp, Homo sapiens
agtagaaaaacaacatcagtctagtgcaaaaag

SEQ ID NO: 34654 - DNA, 33 bp, Homo sapiens
aatgaatagctaatgaacaccagacagtaaagg

SEQ ID NO: 34655 - DNA, 33 bp, Homo sapiens
gtggaaccaccgagcacaagtttgggaacctag

SEQ ID NO: 34656 - DNA, 33 bp, Homo sapiens
gttttcccctagtttcgaaccctgcttaaggac

SEQ ID NO: 34657 - DNA, 33 bp, Homo sapiens
catgttcaacaactaaacaaagtatttgcatcc

SEQ ID NO: 34658 - DNA, 33 bp, Homo sapiens
tgaggagctaagtcacactaccaattggctttt

SEQ ID NO: 34659 - DNA, 51 bp, Homo sapiens
caatatttttattagttcagtagtcgatcagtttgcacagagaagtggatt

SEQ ID NO: 34660 - DNA, 33 bp, Homo sapiens
acatatgctgcttttccaatctcagagacaagt

SEQ ID NO: 34661 - DNA, 33 bp, Homo sapiens
ccaaacacaggaggccactatattggtgacaga

SEQ ID NO: 34662 - DNA, 33 bp, Homo sapiens
gagagaaacccacctgcagactcggttaggctt

SEQ ID NO: 34663 - DNA, 33 bp, Homo sapiens
aagagcaggttcgccgacagacacagagttaaa

SEQ ID NO: 34664 - DNA, 33 bp, Homo sapiens
atctcctcatattcaaattctagctaagaagaa

SEQ ID NO: 34665 - DNA, 33 bp, Homo sapiens
cttccatacccttagactcaagttttctgttta

SEQ ID NO: 34666 - DNA, 33 bp, Homo sapiens
ccttttctgttaaaaacatccacgtcctgaaca

SEQ ID NO: 34667 - DNA, 33 bp, Homo sapiens
cttgtctctctacctacgttacaaccccctaga

SEQ ID NO: 34668 - DNA, 33 bp, Homo sapiens
gtgttagtgtccctaccgaagatgctatgaaat

SEQ ID NO: 34669 - DNA, 33 bp, Homo sapiens
ttctagttttggcaccgctatcttctctccttg

SEQ ID NO: 34670 - DNA, 33 bp, Homo sapiens
cagtcatggaaatggaagtgagagaaccacaga

SEQ ID NO: 34671 - DNA, 33 bp, Homo sapiens
ctgaagctcctgcagacgagtggggtgttacaa

SEQ ID NO: 34672 - DNA, 33 bp, Homo sapiens
tctgtttcttgctccacctagtatttctccagg

SEQ ID NO: 34673 - DNA, 33 bp, Homo sapiens
tctagatttcatgagtaaaaagcactcagaagt

SEQ ID NO: 34674 - DNA, 33 bp, Homo sapiens
ttgcaagaagtgggaaaagacatggtgcaagac

SEQ ID NO: 34675 - DNA, 33 bp, Homo sapiens
aggctggggactagtgcatcatcgcttaggatt

SEQ ID NO: 34676 - DNA, 33 bp, Homo sapiens
aatgtggagcaactacagacatgcaaaatgata

SEQ ID NO: 34677 - DNA, 33 bp, Homo sapiens
agataagaaagtccaacaaatgtggagcaacta

SEQ ID NO: 34678 - DNA, 33 bp, Homo sapiens
ggaagccacatcttgacaaatgcagaggcaatt

SEQ ID NO: 34679 - DNA, 33 bp, Homo sapiens
attatgttctctctaacgaattggtaactgaca

SEQ ID NO: 34680 - DNA, 33 bp, Homo sapiens
tccatccttatctagaaggcaagaagggttgtt

SEQ ID NO: 34681 - DNA, 33 bp, Homo sapiens
aatttcttatgatgcaaaatcggtgaccttata

SEQ ID NO: 34682 - DNA, 33 bp, Homo sapiens
ttcctgctatagtggaagtaagaccttattatt

SEQ ID NO: 34683 - DNA, 33 bp, Homo sapiens
catttattcattcaaaaattaaccactagctgt

SEQ ID NO: 34684 - DNA, 33 bp, Homo sapiens
agatagattgccctaacatctggcttagagtac

SEQ ID NO: 34685 - DNA, 33 bp, Homo sapiens
gatatgggtgataagaagaagtcctgctcctga

SEQ ID NO: 34686 - DNA, 33 bp, Homo sapiens
agaagtgctctatgatcaagaggtagtgtccaa

SEQ ID NO: 34687 - DNA, 51 bp, Homo sapiens
aatcttgatattttaaaggtacatacgatgccaatgttgccgtatagctca

SEQ ID NO: 34688 - DNA, 51 bp, Homo sapiens
agattttgaaaagtcctgtagaaacaaaatactgtatatttttcaacattt

SEQ ID NO: 34689 - DNA, 51 bp, Homo sapiens
acgatggacatccagaactggagtaaaaagaagcgttggaataccctttca

SEQ ID NO: 34690 - DNA, 33 bp, Homo sapiens
aaatgttcaatgaatggatgaaaattaatctgc

SEQ ID NO: 34691 - DNA, 33 bp, Homo sapiens
ctcttcacacaaaaaaacaatatttgaggccga

SEQ ID NO: 34692 - DNA, 33 bp, Homo sapiens
gaaaaagaagtgatgtaaaagagatcatctttt

SEQ ID NO: 34693 - DNA, 33 bp, Homo sapiens
agatgatttctaaggcccttgtagatctgaaac

SEQ ID NO: 34694 - DNA, 33 bp, Homo sapiens
ccctggtcagtgccaacactcataatgacttgt

SEQ ID NO: 34695 - DNA, 33 bp, Homo sapiens
gtttccaaactttaaccctaagctcagtctcag

SEQ ID NO: 34696 - DNA, 33 bp, Homo sapiens
tggggtcccttgtcagaaacctaatgcccctaa

SEQ ID NO: 34697 - DNA, 33 bp, Homo sapiens
acagtttgtattttgcaaaggagaaaaatatga

SEQ ID NO: 34698 - DNA, 33 bp, Homo sapiens
atggaagttaaaatacgggctagagcaaagaga

SEQ ID NO: 34699 - DNA, 33 bp, Homo sapiens
aatcaccatgctgtaaaagtagtcaaccatctc

SEQ ID NO: 34700 - DNA, 33 bp, Homo sapiens
gacatttgggtagcggcaaattttgaatcatct

SEQ ID NO: 34701 - DNA, 33 bp, Homo sapiens
tgtggagggggaaacaacgattggaataaatgc

SEQ ID NO: 34702 - DNA, 33 bp, Homo sapiens
cacctaatggggtgcactatcataaaatgtaga

SEQ ID NO: 34703 - DNA, 33 bp, Homo sapiens
acagtacaggtatgtacagtttaacacaaagca

SEQ ID NO: 34704 - DNA, 33 bp, Homo sapiens
agggtatcgccatggaagacttaataacttggg

SEQ ID NO: 34705 - DNA, 33 bp, Homo sapiens
ttttatttacctgaacacttctaataggacact

SEQ ID NO: 34706 - DNA, 33 bp, Homo sapiens
cactctgtctcatgatgaattccaggatcttgt

SEQ ID NO: 34707 - DNA, 33 bp, Homo sapiens
aaatagggtagccgaaatgaaaccaaagattaa

SEQ ID NO: 34708 - DNA, 33 bp, Homo sapiens
gtactgtaacctcttacggaatcccttcttttc

SEQ ID NO: 34709 - DNA, 33 bp, Homo sapiens
tacgcaataataggaacttacgtactttgttat

SEQ ID NO: 34710 - DNA, 33 bp, Homo sapiens
gccacttgtaagcatacggatgagattttgtct

SEQ ID NO: 34711 - DNA, 33 bp, Homo sapiens
acatttgtgaatatcaactctgttcttggcatc

SEQ ID NO: 34712 - DNA, 51 bp, Homo sapiens
aataaaaataggcaaacactatatacgctgtaaacctttggagtactcctt

SEQ ID NO: 34713 - DNA, 33 bp, Homo sapiens
gctacctgtaatagaccagaatctgttggttaa

SEQ ID NO: 34714 - DNA, 33 bp, Homo sapiens
ccgaattatgacattacattttccctcatgaaa

SEQ ID NO: 34715 - DNA, 33 bp, Homo sapiens
tgatctaactacagggccatggaaagcttttct

SEQ ID NO: 34716 - DNA, 33 bp, Homo sapiens
tgtagtcaattctcaacagatgacagccatggt

SEQ ID NO: 34717 - DNA, 33 bp, Homo sapiens
aagaagaagaaaaaaacacatccaaatccaaaa

SEQ ID NO: 34718 - DNA, 33 bp, Homo sapiens
tgtgtgctttggaggactaatagggcaggaatg

SEQ ID NO: 34719 - DNA, 33 bp, Homo sapiens
atttacaaaagcaggcaaatcttaaataaacac

SEQ ID NO: 34720 - DNA, 33 bp, Homo sapiens
ctgttttgatcattcacgtttgctttcttatat

SEQ ID NO: 34721 - DNA, 33 bp, Homo sapiens
tgtaattcctaaggataagtctaaagttgcttg

SEQ ID NO: 34722 - DNA, 33 bp, Homo sapiens
taaccaatcaaatgaccgtaacatctgtgctgg

SEQ ID NO: 34723 - DNA, 33 bp, Homo sapiens
ttggcgagaaatagtcactgaagtcaagcagaa

SEQ ID NO: 34724 - DNA, 33 bp, Homo sapiens
ggttagctgaaaatgaataaatgacaagagggg

SEQ ID NO: 34725 - DNA, 33 bp, Homo sapiens
ttctcaggtgcaaaatgagactagctattccct

SEQ ID NO: 34726 - DNA, 33 bp, Homo sapiens
acactgcagaaatacaatggttatcaagaatgt

SEQ ID NO: 34727 - DNA, 33 bp, Homo sapiens
attcaaatattgttatcaaagtggtgccaaaaa

SEQ ID NO: 34728 - DNA, 33 bp, Homo sapiens
catgtcataaatacataaatttccaagcagtca

SEQ ID NO: 34729 - DNA, 33 bp, Homo sapiens
atgtccaacttcatggccaaatgtaaactttgg

SEQ ID NO: 34730 - DNA, 33 bp, Homo sapiens
tgaatagactcattcacggggaagtcatgcctt

SEQ ID NO: 34731 - DNA, 33 bp, Homo sapiens
atgataagcgcgcaaacggttgtggagtgaaga

SEQ ID NO: 34732 - DNA, 33 bp, Homo sapiens
caagtttagtgaaatacgggaacatgtacagag

SEQ ID NO: 34733 - DNA, 33 bp, Homo sapiens
ctctgcaatggaatgacggtcagaaaagaacag

SEQ ID NO: 34734 - DNA, 33 bp, Homo sapiens
aaaagggagtgttttacggacaacgaggcagca

SEQ ID NO: 34735 - DNA, 33 bp, Homo sapiens
tgaaccatttttgggcacactagttcctgaggg

SEQ ID NO: 34736 - DNA, 33 bp, Homo sapiens
aggcattttagatgacagcattgcgggatctcg

SEQ ID NO: 34737 - DNA, 33 bp, Homo sapiens
gaatatcctaacaatcaaactctgtgccaggaa

SEQ ID NO: 34738 - DNA, 33 bp, Homo sapiens
acaaattgcaaacagccaatatggaaatgcgtg

SEQ ID NO: 34739 - DNA, 33 bp, Homo sapiens
cgtttctaagtaaagcacactgttccaagctta

SEQ ID NO: 34740 - DNA, 33 bp, Homo sapiens
tacgttccaactagataaaaggacagcattata

SEQ ID NO: 34741 - DNA, 33 bp, Homo sapiens
gttacttgcaagcagacggatgggaagattgga

SEQ ID NO: 34742 - DNA, 33 bp, Homo sapiens
catgagaatcaactataatacagctgactggaa

SEQ ID NO: 34743 - DNA, 33 bp, Homo sapiens
ttccactctcttaatcactgacctgttttcagc

SEQ ID NO: 34744 - DNA, 33 bp, Homo sapiens
atctttgaatcaagagaagcctcatctgattta

SEQ ID NO: 34745 - DNA, 33 bp, Homo sapiens
ccaaggcaacttggaaacacttcccggacagct

SEQ ID NO: 34746 - DNA, 33 bp, Homo sapiens
ggaattcagtggaaacaggtaatcagatgaaga

SEQ ID NO: 34747 - DNA, 33 bp, Homo sapiens
ccacaattttaacatgcagcttaatgctaattg

SEQ ID NO: 34748 - DNA, 33 bp, Homo sapiens
agatctcctgtcctagcatggagactctggaga

SEQ ID NO: 34749 - DNA, 33 bp, Homo sapiens
tccaccagtgggtggaagaaggaagccaaaagg

SEQ ID NO: 34750 - DNA, 33 bp, Homo sapiens
cactattggacaggaacaactatgagtcgcccc

SEQ ID NO: 34751 - DNA, 33 bp, Homo sapiens
tactttaagccaatggccaaaatatggtgctgt

SEQ ID NO: 34752 - DNA, 33 bp, Homo sapiens
gtgggcaattacgcaaactttacctctagggaa

SEQ ID NO: 34753 - DNA, 33 bp, Homo sapiens
catatacaatggtttcagaaaaacaatttgcta

SEQ ID NO: 34754 - DNA, 33 bp, Homo sapiens
aaattatagcggacagaaaaaaaagtcagtgtt

SEQ ID NO: 34755 - DNA, 33 bp, Homo sapiens
gttctggcactttcccaaaaccgtagccatcag

SEQ ID NO: 34756 - DNA, 33 bp, Homo sapiens
aagaatacatttgaagcctgttttttccccttt

SEQ ID NO: 34757 - DNA, 51 bp, Homo sapiens
acactataagcattagaatcttgaaatagaatcttgacattatctgacttc

SEQ ID NO: 34758 - DNA, 33 bp, Homo sapiens
ttgtcttggataaaaaggaagacgaggacaagg

SEQ ID NO: 34759 - DNA, 33 bp, Homo sapiens
caaaaaacaaaatagacatgtggatttcagagt

SEQ ID NO: 34760 - DNA, 33 bp, Homo sapiens
gtccagccacagaataaatttttaaaggtcttg

SEQ ID NO: 34761 - DNA, 33 bp, Homo sapiens
agcaggaaggagtgaacggaaaagtagctgaga

SEQ ID NO: 34762 - DNA, 33 bp, Homo sapiens
agtgtatgagggaaaacatggtgcatttagata

SEQ ID NO: 34763 - DNA, 33 bp, Homo sapiens
tgcacatagacaaatacatagaagaatgaaggg

SEQ ID NO: 34764 - DNA, 33 bp, Homo sapiens
aacatttttctgaacacgaaattcaaacctatc

SEQ ID NO: 34765 - DNA, 33 bp, Homo sapiens
caggcctgagagcacccgaggagtttagattta

SEQ ID NO: 34766 - DNA, 33 bp, Homo sapiens
acactcaggcaataaaaaaaagtataaagaata

SEQ ID NO: 34767 - DNA, 33 bp, Homo sapiens
aagaataaattttctcaaatcctcaaaaatagt

SEQ ID NO: 34768 - DNA, 33 bp, Homo sapiens
catccaaactagtagaagggaaaatggaactaa

SEQ ID NO: 34769 - DNA, 33 bp, Homo sapiens
ctctcatctgtggctcacaagtgctccaggaga

SEQ ID NO: 34770 - DNA, 33 bp, Homo sapiens
caaattctcgcctggaagtcagttaagaaaagg

SEQ ID NO: 34771 - DNA, 33 bp, Homo sapiens
tactctattctagacactgaaattatgcagaga

SEQ ID NO: 34772 - DNA, 33 bp, Homo sapiens
ggctggtgatcagggacgatgagcttttctcat

SEQ ID NO: 34773 - DNA, 33 bp, Homo sapiens
tacatggtaaaagcaaacaacatagatgagagt

SEQ ID NO: 34774 - DNA, 33 bp, Homo sapiens
atcaatcaatcgtacaatcttcctttacctaaa

SEQ ID NO: 34775 - DNA, 33 bp, Homo sapiens
ctaacttgacagccacacaagggggacagttag

SEQ ID NO: 34776 - DNA, 33 bp, Homo sapiens
ccctacatttacaggacggtcagctgtccccat

SEQ ID NO: 34777 - DNA, 33 bp, Homo sapiens
tcctgatgcagacccacgaggatcctctgccag

SEQ ID NO: 34778 - DNA, 33 bp, Homo sapiens
tgacctcttcaggagacggtgaccccgagatgt

SEQ ID NO: 34779 - DNA, 33 bp, Homo sapiens
atttgggatcagggtaaatgaatgaaatttgat

SEQ ID NO: 34780 - DNA, 33 bp, Homo sapiens
ttcaaggatgaaacccactcatggctgaagagt

SEQ ID NO: 34781 - DNA, 33 bp, Homo sapiens
atccatcaatcgcttacgactttcatgacatca

SEQ ID NO: 34782 - DNA, 33 bp, Homo sapiens
caccctacatgtttgaagctaataagacagttt

SEQ ID NO: 34783 - DNA, 33 bp, Homo sapiens
gggttccaacattcatcatccagtttcagagac

SEQ ID NO: 34784 - DNA, 33 bp, Homo sapiens
ggcaatgatgtgtcaccgtagattaatcagttg

SEQ ID NO: 34785 - DNA, 33 bp, Homo sapiens
tgagggtgaggaacaacttagaatttctgctga

SEQ ID NO: 34786 - DNA, 33 bp, Homo sapiens
agtcctctggtgaggacgcatggtaaagagtgt

SEQ ID NO: 34787 - DNA, 33 bp, Homo sapiens
ttagaaattactggtacggtcttatgtttgata

SEQ ID NO: 34788 - DNA, 33 bp, Homo sapiens
gatccatcacagctgccacctcggtctacttag

SEQ ID NO: 34789 - DNA, 33 bp, Homo sapiens
ctcccacttttaccccacgctttctcactctcc

SEQ ID NO: 34790 - DNA, 33 bp, Homo sapiens
agaagccctccatgtcaaagtctccagctcaga

SEQ ID NO: 34791 - DNA, 33 bp, Homo sapiens
cgctggatatgaagccactgtgtaacacacaaa

SEQ ID NO: 34792 - DNA, 33 bp, Homo sapiens
agaatttcagggaaacaacaatagtgaaaacat

SEQ ID NO: 34793 - DNA, 33 bp, Homo sapiens
ggattgaacctttatcagaagggaggtttctgc

SEQ ID NO: 34794 - DNA, 33 bp, Homo sapiens
gatgtaattccctccacgctaagcttatgaccc

SEQ ID NO: 34795 - DNA, 51 bp, Homo sapiens
tgatttatttattgtaactttatcacgtcttaatttccatagggtttgccc

SEQ ID NO: 34796 - DNA, 33 bp, Homo sapiens
gcttgatggtgcaggaaacagtaaatgcatcag

SEQ ID NO: 34797 - DNA, 33 bp, Homo sapiens
acctgaggaccctctcactcaagcatggggaca

SEQ ID NO: 34798 - DNA, 33 bp, Homo sapiens
ataccaacagacaccactagataccaacaggtg

SEQ ID NO: 34799 - DNA, 33 bp, Homo sapiens
catggaacatggaccaacgcaaaatcctgccat

SEQ ID NO: 34800 - DNA, 33 bp, Homo sapiens
tctgtgcactgttcccacagaagctggatttgt

SEQ ID NO: 34801 - DNA, 33 bp, Homo sapiens
tactatgcggtctcaccgaaacatctggagcac

SEQ ID NO: 34802 - DNA, 33 bp, Homo sapiens
cacacttagtttgagaagacaaattctccaagt

SEQ ID NO: 34803 - DNA, 51 bp, Homo sapiens
cacacaagctttcacgtttacttgacatttgatctagtgacagcttatcag

SEQ ID NO: 34804 - DNA, 33 bp, Homo sapiens
agttttgggctgatacaaatgaagcgttatgaa

SEQ ID NO: 34805 - DNA, 51 bp, Homo sapiens
ctgagtgctccagcaccaatcagatcatgtatgtgttactcagaagagatg

SEQ ID NO: 34806 - DNA, 51 bp, Homo sapiens
gaaggctgatgtgctgatacctgacaaaagagattctaaagcaaaggcatc

SEQ ID NO: 34807 - DNA, 33 bp, Homo sapiens
aaggagacattggtaacggaagaagaggtcgga

SEQ ID NO: 34808 - DNA, 33 bp, Homo sapiens
gcacttgcaggtttaccgaatgtgaaatcagag

SEQ ID NO: 34809 - DNA, 33 bp, Homo sapiens
accaaagagcctctctcactttaaccacaaggg

SEQ ID NO: 34810 - DNA, 33 bp, Homo sapiens
tatttagagtcttaccaagtggggctctccaaa

SEQ ID NO: 34811 - DNA, 33 bp, Homo sapiens
aaataaatagtatctgaaagtgccacaaatggg

SEQ ID NO: 34812 - DNA, 33 bp, Homo sapiens
acgtagagactgaacagtaactgaagtgtgtgg

SEQ ID NO: 34813 - DNA, 33 bp, Homo sapiens
gttgcaaacatccacactaatatcgattttgtc

SEQ ID NO: 34814 - DNA, 51 bp, Homo sapiens
taaaatacttccatttctttcaggaccagccacctgccatgttgataccct

SEQ ID NO: 34815 - DNA, 51 bp, Homo sapiens
tcaaatctcacactaaagccatctaaatttgggagaggatctgggtgtgat

SEQ ID NO: 34816 - DNA, 33 bp, Homo sapiens
tttggcagcccttcaacgtgtgggaagtaggag

SEQ ID NO: 34817 - DNA, 33 bp, Homo sapiens
atacaagaaaatggaacggaaaagcattggcct

SEQ ID NO: 34818 - DNA, 33 bp, Homo sapiens
tcaacattacgattacaaaggatgaaagtggtg

SEQ ID NO: 34819 - DNA, 33 bp, Homo sapiens
ggacatgaggtttacacacttcattagggctcc

SEQ ID NO: 34820 - DNA, 33 bp, Homo sapiens
cgagcctgcaattgaccgcggaagccagtgccc

SEQ ID NO: 34821 - DNA, 33 bp, Homo sapiens
cttgaaggcttcagaacaggtgtaacagggatg

SEQ ID NO: 34822 - DNA, 33 bp, Homo sapiens
ttgcagatctgaacaccaacatcattgaccaat

SEQ ID NO: 34823 - DNA, 33 bp, Homo sapiens
tcttattcacctgttacgtacatgggcttctaa

SEQ ID NO: 34824 - DNA, 33 bp, Homo sapiens
cgtattattggaaatcacaccaatttgggggtt

SEQ ID NO: 34825 - DNA, 33 bp, Homo sapiens
acgtaggaagaataaaatctcatccaaacacaa

SEQ ID NO: 34826 - DNA, 33 bp, Homo sapiens
ctagatgccaaaaatacgtgtctcctaagctca

SEQ ID NO: 34827 - DNA, 51 bp, Homo sapiens
aaaggtttatacacatcaggacatgcagagtaaatctgtttatgacatgaa

SEQ ID NO: 34828 - DNA, 33 bp, Homo sapiens
cagggaaggaggttaacaaggaaatgcacagat

SEQ ID NO: 34829 - DNA, 33 bp, Homo sapiens
ccaatcgcatcctccactcaagaaagcttgact

SEQ ID NO: 34830 - DNA, 33 bp, Homo sapiens
agagatgctctcaaaccggtcgtcgattattct

SEQ ID NO: 34831 - DNA, 33 bp, Homo sapiens
tctagaggctaacccagctggactctggaggaa

SEQ ID NO: 34832 - DNA, 33 bp, Homo sapiens
accacagccattcccaagtcttctccgaatggc

SEQ ID NO: 34833 - DNA, 33 bp, Homo sapiens
tgtgtccctatgccacggtgccggaaacaagtc

SEQ ID NO: 34834 - DNA, 33 bp, Homo sapiens
cgttgtgctcaaaataccgcttacgtccgtctt

SEQ ID NO: 34835 - DNA, 33 bp, Homo sapiens
aaaactgaggagaccccaaaaagatcagtgact

SEQ ID NO: 34836 - DNA, 33 bp, Homo sapiens
ccgccttcagcccaaacgtggtggcgcatccag

SEQ ID NO: 34837 - DNA, 33 bp, Homo sapiens
tttactcaagacggtgaaattaatttggcactg

SEQ ID NO: 34838 - DNA, 33 bp, Homo sapiens
ttctatgtgtattgcaatcctaatttgtgtttt

SEQ ID NO: 34839 - DNA, 33 bp, Homo sapiens
gggaaacaaggagctacgtaaggacacagcagc

SEQ ID NO: 34840 - DNA, 33 bp, Homo sapiens
agtgtgttgactttcacgtcgatgacaggcagc

SEQ ID NO: 34841 - DNA, 33 bp, Homo sapiens
tctttatgcatccacaatcattcactgtaacaa

SEQ ID NO: 34842 - DNA, 33 bp, Homo sapiens
atctacagtaaaaccacagggttgatctttggt

SEQ ID NO: 34843 - DNA, 33 bp, Homo sapiens
ttgttaaatagtggagacatttggtgtaatctt

SEQ ID NO: 34844 - DNA, 33 bp, Homo sapiens
tcagagatattcatccaatcctcctgctacaag

SEQ ID NO: 34845 - DNA, 33 bp, Homo sapiens
acaaatgtacaggaataaaaaaaaacatcaaaa

SEQ ID NO: 34846 - DNA, 33 bp, Homo sapiens
cagatgtgtgctttcactcaataaacatggctt

SEQ ID NO: 34847 - DNA, 33 bp, Homo sapiens
cacatcctgccaaataaatcagtccatgctctg

SEQ ID NO: 34848 - DNA, 33 bp, Homo sapiens
ggatagcacttaaacactgaagaggatagagct

SEQ ID NO: 34849 - DNA, 33 bp, Homo sapiens
acaacaggattgaaaaacattagccacaaagga

SEQ ID NO: 34850 - DNA, 33 bp, Homo sapiens
gatggaaattgattacaacaaatgaatcctctg

SEQ ID NO: 34851 - DNA, 51 bp, Homo sapiens
gaacagttctagatttcaatccaataaagtgatttgttctctactctgcac

SEQ ID NO: 34852 - DNA, 51 bp, Homo sapiens
tttctctttgtgtgaaaccgtcatagcccagaaaattagaccagttacaat

SEQ ID NO: 34853 - DNA, 51 bp, Homo sapiens
tatgaggaaaaaagaggtaattggaagaaaacaaatataacaactctttca

SEQ ID NO: 34854 - DNA, 33 bp, Homo sapiens
gcgatgccatcctcaaagtctcttaccagtgtg

SEQ ID NO: 34855 - DNA, 33 bp, Homo sapiens
ccctccatttatattcaccagcgtctccttaca

SEQ ID NO: 34856 - DNA, 51 bp, Homo sapiens
attcttttctgaaatagtgcagaatcaacatcatagaattttatgttgtca

SEQ ID NO: 34857 - DNA, 33 bp, Homo sapiens
gggtgaaatattgataaatagaagggcaacaaa

SEQ ID NO: 34858 - DNA, 33 bp, Homo sapiens
atccaccctgagttaactgtcttgcctcatctg

SEQ ID NO: 34859 - DNA, 33 bp, Homo sapiens
ctagcgaccttgatgactatgagctgttacatg

SEQ ID NO: 34860 - DNA, 33 bp, Homo sapiens
cagccgcacaaagtacactgcctgcacttccca

SEQ ID NO: 34861 - DNA, 33 bp, Homo sapiens
aacatgggcttgaagacaaaagtagtagagtat

SEQ ID NO: 34862 - DNA, 51 bp, Homo sapiens
tagtggagataagatctatatgagtcaataatcagaattaattacaaatga

SEQ ID NO: 34863 - DNA, 51 bp, Homo sapiens
gataattttgatttacagcatcctacgagacatttctacatgcataacagt

SEQ ID NO: 34864 - DNA, 51 bp, Homo sapiens
aaaacagctactgctagagactgtacaaatattctgtaaaaacagcaaaaa

SEQ ID NO: 34865 - DNA, 33 bp, Homo sapiens
tctgtaggagtagcgacgatgaactgtttaaca

SEQ ID NO: 34866 - DNA, 33 bp, Homo sapiens
aattaaacctgtgtcacgtgaaatgtaagaaca

SEQ ID NO: 34867 - DNA, 33 bp, Homo sapiens
tttcattaagtacttacgattagccagtacccc

SEQ ID NO: 34868 - DNA, 33 bp, Homo sapiens
gagccctgctttggtcacctctagtcatgtctt

SEQ ID NO: 34869 - DNA, 33 bp, Homo sapiens
aagccatgtgtagaaaagtttcaaaatcatggg

SEQ ID NO: 34870 - DNA, 33 bp, Homo sapiens
aagaaaattagaaggacggaagaagtgatgttt

SEQ ID NO: 34871 - DNA, 51 bp, Homo sapiens
tagtgagtttggggtttttgcaacactgaggtcgataatgggacctggaga

SEQ ID NO: 34872 - DNA, 33 bp, Homo sapiens
acacctgctcttgaaaggctccttcttcttccg

SEQ ID NO: 34873 - DNA, 33 bp, Homo sapiens
tggcctgaataatgaaagcaatttgaagctatc

SEQ ID NO: 34874 - DNA, 33 bp, Homo sapiens
aaggggattgcttttggacttagcattacccca

SEQ ID NO: 34875 - DNA, 51 bp, Homo sapiens
agcagtgtgcaattattttcaaacacgaggattctccccatatcataaaga

SEQ ID NO: 34876 - DNA, 51 bp, Homo sapiens
tcttgcaaacgacccctctacatagaactaacacggaattgaggcttgcct

SEQ ID NO: 34877 - DNA, 51 bp, Homo sapiens
cctttcattgaaagttcttgttcacaatttttatcgataaatatttgttta

SEQ ID NO: 34878 - DNA, 51 bp, Homo sapiens
gatatttaatatcatagaggagttacggacataggtacacacagaggagtc

SEQ ID NO: 34879 - DNA, 51 bp, Homo sapiens
ctcccagtaagtcgaacatgaagcaaatgccttactacatggtctatagat

SEQ ID NO: 34880 - DNA, 33 bp, Homo sapiens
actggtcctcgttggccaattcaggatgtgatg

SEQ ID NO: 34881 - DNA, 33 bp, Homo sapiens
atgtgagctcagaagacgacacagtagtctaag

SEQ ID NO: 34882 - DNA, 33 bp, Homo sapiens
ctgtcttccaacttgaaaccttgtcccactgga

SEQ ID NO: 34883 - DNA, 33 bp, Homo sapiens
tcagccttcacttgccaaatgattggtcgttgg

SEQ ID NO: 34884 - DNA, 33 bp, Homo sapiens
attctgaagtaacttacggatatcaggagctga

SEQ ID NO: 34885 - DNA, 33 bp, Homo sapiens
caaggtttagggtgatcagcatccaattttaag

SEQ ID NO: 34886 - DNA, 33 bp, Homo sapiens
taaaggaaattttcccagattacacttggaaca

SEQ ID NO: 34887 - DNA, 33 bp, Homo sapiens
tcattgtggctatgtcgacaatatagctaggca

SEQ ID NO: 34888 - DNA, 33 bp, Homo sapiens
tgttggaattagcggacaaggattttaatgcag

SEQ ID NO: 34889 - DNA, 33 bp, Homo sapiens
aaatgctgtacattatcaggagagatagtagtt

SEQ ID NO: 34890 - DNA, 33 bp, Homo sapiens
tgatgaagttactgacgagagaaggccagtggc

SEQ ID NO: 34891 - DNA, 33 bp, Homo sapiens
aaatgatccatcagtacacaaaataggaagatg

SEQ ID NO: 34892 - DNA, 33 bp, Homo sapiens
gaattggcatcttctgaaatactgtaaattaga

SEQ ID NO: 34893 - DNA, 33 bp, Homo sapiens
catctagataaatggccactgcgttttccactt

SEQ ID NO: 34894 - DNA, 51 bp, Homo sapiens
aatcagcatccttcatttgaatatcacggtttaataccaccaaagcagcac

SEQ ID NO: 34895 - DNA, 33 bp, Homo sapiens
ataatcaaataagatacgtcacattattagcga

SEQ ID NO: 34896 - DNA, 33 bp, Homo sapiens
acaaaaatgcaaaaatcagtacaggctgggaac

SEQ ID NO: 34897 - DNA, 33 bp, Homo sapiens
aaatcctgagaagaaaaagttggatttgaatgt

SEQ ID NO: 34898 - DNA, 33 bp, Homo sapiens
gattgcgacttttaaccggttaatccactgcta

SEQ ID NO: 34899 - DNA, 33 bp, Homo sapiens
atttccttcttcttcacagatgtggtataagct

SEQ ID NO: 34900 - DNA, 33 bp, Homo sapiens
gatggcctcacctgcacaatagatactctgttg

SEQ ID NO: 34901 - DNA, 51 bp, Homo sapiens
ccactgatcacaaaaatcagacctacagaggaaaataattttatggttgtc

SEQ ID NO: 34902 - DNA, 33 bp, Homo sapiens
gagatattggcaaaggcaaaacaggctgcaggt

SEQ ID NO: 34903 - DNA, 33 bp, Homo sapiens
cttctgctgtaatccactcttataatgcaggag

SEQ ID NO: 34904 - DNA, 33 bp, Homo sapiens
agtaaaagtatattgcaagagctaatttagttc

SEQ ID NO: 34905 - DNA, 51 bp, Homo sapiens
ttgtgggaaatcattcacacctgaaaaatgaacccctctaatgtttttcta

SEQ ID NO: 34906 - DNA, 51 bp, Homo sapiens
cacaattaccgagttaaaagaatgcagcagatgtcgatattgtgggaaatc

SEQ ID NO: 34907 - DNA, 33 bp, Homo sapiens
aatgctatcttccataccaaagttaaagaagga

SEQ ID NO: 34908 - DNA, 33 bp, Homo sapiens
taagttgacttcctctcaagcttggcatttggt

SEQ ID NO: 34909 - DNA, 33 bp, Homo sapiens
ctttaatatgtgcataagtgttacgcaactctt

SEQ ID NO: 34910 - DNA, 33 bp, Homo sapiens
aaagacgattggataagtgaaaacaatgacttt

SEQ ID NO: 34911 - DNA, 33 bp, Homo sapiens
ttgtatgacaagtgaaatatgaccataaaccac

SEQ ID NO: 34912 - DNA, 33 bp, Homo sapiens
atttgcagatttctaacgccctatcagataaat

SEQ ID NO: 34913 - DNA, 33 bp, Homo sapiens
tcagaagacaggaaagaataatagacacaacaa

SEQ ID NO: 34914 - DNA, 33 bp, Homo sapiens
tcgcagaatgaatcaacagagaacagtagcttg

SEQ ID NO: 34915 - DNA, 33 bp, Homo sapiens
atttctgatattaaaacagaccttgccaaaatt

SEQ ID NO: 34916 - DNA, 33 bp, Homo sapiens
aataaaagaatgttataaagcttcagatgtcat

SEQ ID NO: 34917 - DNA, 33 bp, Homo sapiens
aagaagaaagaagagcaaatgtaaggcgtgcag

SEQ ID NO: 34918 - DNA, 33 bp, Homo sapiens
acctggtgacttttaacaaatctccattcactt

SEQ ID NO: 34919 - DNA, 33 bp, Homo sapiens
gtaaatttgatggaaactgctgaagaaggagag

SEQ ID NO: 34920 - DNA, 33 bp, Homo sapiens
acaacttccacgtgcacctttctccctctgtga

SEQ ID NO: 34921 - DNA, 33 bp, Homo sapiens
aaattcactctgaaatcaaatgtattcctcctc

SEQ ID NO: 34922 - DNA, 51 bp, Homo sapiens
gtctgtacatatcagcctggtcccaaagaacctttgacatttagcctgtgt

SEQ ID NO: 34923 - DNA, 33 bp, Homo sapiens
ttgttttagtttcacaatgcctctttggaggag

SEQ ID NO: 34924 - DNA, 33 bp, Homo sapiens
cacattcagcatttaacaataacagaataaaag

SEQ ID NO: 34925 - DNA, 33 bp, Homo sapiens
acactgaatggcccccgaatgatgaatttttaa

SEQ ID NO: 34926 - DNA, 33 bp, Homo sapiens
atgaacatccctaccaatattttacaagggttc

SEQ ID NO: 34927 - DNA, 33 bp, Homo sapiens
tgaaggaatcgtgtccccacacttacctccaac

SEQ ID NO: 34928 - DNA, 33 bp, Homo sapiens
actttaactattaaacgagcgagcgtttgatgt

SEQ ID NO: 34929 - DNA, 51 bp, Homo sapiens
tgccaaaatgataggaatagattgggcaggaataaatattgaacattttct

SEQ ID NO: 34930 - DNA, 51 bp, Homo sapiens
aggatattgtctgaaatatgataaacggccagcaggtgttagtacataaat

SEQ ID NO: 34931 - DNA, 51 bp, Homo sapiens
tctaagatgtgttaaggttttagtacgcatctgatggacttgtaagggaga

SEQ ID NO: 34932 - DNA, 33 bp, Homo sapiens
gctttctaaactgtaagatctgcgtcctgcttt

SEQ ID NO: 34933 - DNA, 33 bp, Homo sapiens
gttcaaaagctgaaaaaccttgagtctgatgtc

SEQ ID NO: 34934 - DNA, 33 bp, Homo sapiens
aactctccggtatgtacgtagttcactcacatt

SEQ ID NO: 34935 - DNA, 33 bp, Homo sapiens
tggaccaaacgaaatccagccttctaggttttt

SEQ ID NO: 34936 - DNA, 33 bp, Homo sapiens
acctcctctaacataactcattcttgtcctgca

SEQ ID NO: 34937 - DNA, 33 bp, Homo sapiens
aatacataaatcagaaatggtatgctgatgaaa

SEQ ID NO: 34938 - DNA, 33 bp, Homo sapiens
gtaactggaacagatacgttttaagcagcgtta

SEQ ID NO: 34939 - DNA, 33 bp, Homo sapiens
tctagaactttccctaaatcttacaacagtagt

SEQ ID NO: 34940 - DNA, 33 bp, Homo sapiens
gaaaatggtgatcaaactttatttctaatcaag

SEQ ID NO: 34941 - DNA, 33 bp, Homo sapiens
cctttgcaagaaagagaaatacctgaggcaccg

SEQ ID NO: 34942 - DNA, 33 bp, Homo sapiens
cattctacatatacaccctagtaacaacaagca

SEQ ID NO: 34943 - DNA, 33 bp, Homo sapiens
ccagcagcttagcaaacttgagggcaaacacac

SEQ ID NO: 34944 - DNA, 33 bp, Homo sapiens
ttagttgattcttgaaccactagccaagttaca

SEQ ID NO: 34945 - DNA, 33 bp, Homo sapiens
cccttcaagttaccgtaaagacagaagaaaagg

SEQ ID NO: 34946 - DNA, 33 bp, Homo sapiens
gtgtgtctgtcttttacgttaatggttatgaat

SEQ ID NO: 34947 - DNA, 33 bp, Homo sapiens
ggctccagctcaagagaactgaaggccgctaag

SEQ ID NO: 34948 - DNA, 33 bp, Homo sapiens
tgacttccgcttcacaatattttgcgtcccgta

SEQ ID NO: 34949 - DNA, 33 bp, Homo sapiens
attcataagacagagacacaaagagatacaaag

SEQ ID NO: 34950 - DNA, 33 bp, Homo sapiens
acagtgccaagagggacggtgatacctattcat

SEQ ID NO: 34951 - DNA, 33 bp, Homo sapiens
cactttgaatatcaaccacggaattacaaggag

SEQ ID NO: 34952 - DNA, 33 bp, Homo sapiens
gaaaccagaaaagccaaaaggaggctcctacca

SEQ ID NO: 34953 - DNA, 33 bp, Homo sapiens
gcaattgtgctccagacgtgaaagaggcagctg

SEQ ID NO: 34954 - DNA, 33 bp, Homo sapiens
gctttccaggccattacaccagttttccattta

SEQ ID NO: 34955 - DNA, 33 bp, Homo sapiens
ttctgttccacaagctaagaggaagcagaattt

SEQ ID NO: 34956 - DNA, 51 bp, Homo sapiens
cttgctgctgctctgatgtggccaccgtgattaacgcaatcagcccagcag

SEQ ID NO: 34957 - DNA, 51 bp, Homo sapiens
aagacctactaggcattttaaagaacccactcatgtgatcgaacgataaag

SEQ ID NO: 34958 - DNA, 51 bp, Homo sapiens
cccatgtgcctagtccatgtgacagcattgctttaaaaatcaataaaaatc

SEQ ID NO: 34959 - DNA, 33 bp, Homo sapiens
catggggttagtagtcccttgtaggagccagtg

SEQ ID NO: 34960 - DNA, 33 bp, Homo sapiens
gaggtagatgtgataaggtttctggaaatgaga

SEQ ID NO: 34961 - DNA, 33 bp, Homo sapiens
cagccacaaagcagtccatatatcaagtttctg

SEQ ID NO: 34962 - DNA, 33 bp, Homo sapiens
agtagaggagcttttgcaataacagatgtgtga

SEQ ID NO: 34963 - DNA, 33 bp, Homo sapiens
atgggtcactgatagcaacaccgttggtccggc

SEQ ID NO: 34964 - DNA, 33 bp, Homo sapiens
ctgctggaacgatcaacgtaattagctggacta

SEQ ID NO: 34965 - DNA, 33 bp, Homo sapiens
aacacttatcaagtataaaataaccacaactat

SEQ ID NO: 34966 - DNA, 33 bp, Homo sapiens
aatgatgcttctgaagactgttctaataatata

SEQ ID NO: 34967 - DNA, 33 bp, Homo sapiens
gtatccctcatccaacagcttaagaacttgaac

SEQ ID NO: 34968 - DNA, 33 bp, Homo sapiens
tcaaaaccacttcctgaaattgtcaaagcactg

SEQ ID NO: 34969 - DNA, 33 bp, Homo sapiens
gtgtaagaatgggctaatacacaattcgaccaa

SEQ ID NO: 34970 - DNA, 33 bp, Homo sapiens
tgtgtttttccctttacagttacgaacagaaat

SEQ ID NO: 34971 - DNA, 33 bp, Homo sapiens
cacaagagaaagttcccagcacagagaactgca

SEQ ID NO: 34972 - DNA, 33 bp, Homo sapiens
tatcagggtctgaatcaaacagtcttcagccag

SEQ ID NO: 34973 - DNA, 33 bp, Homo sapiens
cagagtctcattctaaatgcaagcaagacagag

SEQ ID NO: 34974 - DNA, 33 bp, Homo sapiens
atcctccatgtgcagactatctctttggaaaaa

SEQ ID NO: 34975 - DNA, 33 bp, Homo sapiens
taggaaaacttccaagcactgcgtcaaaacata

SEQ ID NO: 34976 - DNA, 33 bp, Homo sapiens
gatcactacacaggcaatcaactacaatcttct

SEQ ID NO: 34977 - DNA, 33 bp, Homo sapiens
tgaattaacaggtaaacaagggagttagtatac

SEQ ID NO: 34978 - DNA, 33 bp, Homo sapiens
catttacttatttgctgaatcctacaacataca

SEQ ID NO: 34979 - DNA, 33 bp, Homo sapiens
cataaaggtctttgaagccacacatttcaggcc

SEQ ID NO: 34980 - DNA, 33 bp, Homo sapiens
tttttttgagatctgaaaaaaagacttaaaagg

SEQ ID NO: 34981 - DNA, 33 bp, Homo sapiens
tcttccacagctttaccaaaatcacatttaaag

SEQ ID NO: 34982 - DNA, 33 bp, Homo sapiens
caggggctcacaataactcctgagcctgaagat

SEQ ID NO: 34983 - DNA, 33 bp, Homo sapiens
tgcagccagatgaaaacgtatgtgataggagtg

SEQ ID NO: 34984 - DNA, 33 bp, Homo sapiens
ttctgtttccaaatacaagatgctgtaagcctg

SEQ ID NO: 34985 - DNA, 33 bp, Homo sapiens
ttgttagttctggaaacttagtcaatttgcatc

SEQ ID NO: 34986 - DNA, 33 bp, Homo sapiens
accacagcaaccatgtaaacggggctgcgccaa

SEQ ID NO: 34987 - DNA, 33 bp, Homo sapiens
atgactggatagccaagagcgctgtaatgctta

SEQ ID NO: 34988 - DNA, 33 bp, Homo sapiens
gctatcaaaaagacccggaaatgtatttgcttg

SEQ ID NO: 34989 - DNA, 33 bp, Homo sapiens
tagggtgccagtgtcaaaaaccagacacggatg

SEQ ID NO: 34990 - DNA, 51 bp, Homo sapiens
ggaggtaaaagagttaagagatagacgcaaatgctgatgtacttcatcgat

SEQ ID NO: 34991 - DNA, 33 bp, Homo sapiens
cagggtcttaagcccacataaaagtcagagaat

SEQ ID NO: 34992 - DNA, 33 bp, Homo sapiens
gtttggctgctatgcccaatgcagccacgaata

SEQ ID NO: 34993 - DNA, 33 bp, Homo sapiens
caggtactgggtaatggagtgtggaaaatcaag

SEQ ID NO: 34994 - DNA, 33 bp, Homo sapiens
actctgaggcccaaagcacaccagacacagact

SEQ ID NO: 34995 - DNA, 33 bp, Homo sapiens
gatgtaccagtcaacacaggccatgggagagca

SEQ ID NO: 34996 - DNA, 33 bp, Homo sapiens
tctgaagaatctagaaatactaagtgtgtgacc

SEQ ID NO: 34997 - DNA, 33 bp, Homo sapiens
tccaccctgatagatgcagcttgtggtaaagtc

SEQ ID NO: 34998 - DNA, 33 bp, Homo sapiens
ttaaggccgagtgttacgtgctgccttgacatc

SEQ ID NO: 34999 - DNA, 33 bp, Homo sapiens
ttccccattggcagacagctatttccactcaaa

SEQ ID NO: 35000 - DNA, 33 bp, Homo sapiens
ctattactaagtaaaagcaaccaatctgtaaag

SEQ ID NO: 35001 - DNA, 33 bp, Homo sapiens
ttagaaccataagatgaatttaattgtaggtct

SEQ ID NO: 35002 - DNA, 33 bp, Homo sapiens
ccaaatgaaataaaaacgtgtgaatgaatccac

SEQ ID NO: 35003 - DNA, 33 bp, Homo sapiens
gccagagcactgaccaaatcaaagactcccatt

SEQ ID NO: 35004 - DNA, 33 bp, Homo sapiens
attttgcaacaatacaagatgttattaactatg

SEQ ID NO: 35005 - DNA, 33 bp, Homo sapiens
gctgatctttgcattacctagacagagaaacaa

SEQ ID NO: 35006 - DNA, 51 bp, Homo sapiens
attctaaaagggctgccgctgcgtgccaaggattctccctcctcattctct

SEQ ID NO: 35007 - DNA, 51 bp, Homo sapiens
gccttacataattcccacaaaagatcataagtgcccaaaccgagagagtgc

SEQ ID NO: 35008 - DNA, 33 bp, Homo sapiens
aagataaagtcgaccactcgtaatatttttttc

SEQ ID NO: 35009 - DNA, 33 bp, Homo sapiens
aggaggacttataccaagaagtttaaagagagg

SEQ ID NO: 35010 - DNA, 33 bp, Homo sapiens
ttgtgatgagatcccacagctgctatgcgggga

SEQ ID NO: 35011 - DNA, 33 bp, Homo sapiens
gccaggtatcacttctgaaatgtttgacttgag

SEQ ID NO: 35012 - DNA, 33 bp, Homo sapiens
aaaacaagcaaacttacgttcctgataattacg

SEQ ID NO: 35013 - DNA, 33 bp, Homo sapiens
gaacagaggtacatataaaccagtcaccctcaa

SEQ ID NO: 35014 - DNA, 33 bp, Homo sapiens
attacaaggaactaggaaaaagaaattgacatt

SEQ ID NO: 35015 - DNA, 33 bp, Homo sapiens
gattatcatggcactcaatgactaccaaaaagt

SEQ ID NO: 35016 - DNA, 51 bp, Homo sapiens
agaaaacagaatagaaagatggagacaattgtgaggtaaaaacattttaca

SEQ ID NO: 35017 - DNA, 33 bp, Homo sapiens
aaatttgtttgcaaaaatcagcacagaagagtt

SEQ ID NO: 35018 - DNA, 33 bp, Homo sapiens
ggtcttaacgcaaagaataatactgaagtacaa

SEQ ID NO: 35019 - DNA, 33 bp, Homo sapiens
agaagctcaacttttacaacttttcaggatctg

SEQ ID NO: 35020 - DNA, 33 bp, Homo sapiens
cactacaagtggcggaccaaaattagtaatcag

SEQ ID NO: 35021 - DNA, 33 bp, Homo sapiens
acactgtcacctaatacccatggcttgacggga

SEQ ID NO: 35022 - DNA, 33 bp, Homo sapiens
ccatgatttaaggtaaggcaattatactcatat

SEQ ID NO: 35023 - DNA, 33 bp, Homo sapiens
tgggtgtaatgcctacgacacaaagcaaaaaca

SEQ ID NO: 35024 - DNA, 33 bp, Homo sapiens
tgctcatcatcgttaaccaggttgaaaacatat

SEQ ID NO: 35025 - DNA, 33 bp, Homo sapiens
gcccagccataggttcacgtaactattctgagc

SEQ ID NO: 35026 - DNA, 33 bp, Homo sapiens
cacgtggccactccaaaggtatctggtatgagg

SEQ ID NO: 35027 - DNA, 51 bp, Homo sapiens
ctctcctcacagaatctaagacctaggcaaccatgccatttacataaaatt

SEQ ID NO: 35028 - DNA, 51 bp, Homo sapiens
gataatatagctacctatcttgaaaatatactgcagaaagtataggcttgg

SEQ ID NO: 35029 - DNA, 33 bp, Homo sapiens
gctccctgagaacttaagctctattcttcaata

SEQ ID NO: 35030 - DNA, 33 bp, Homo sapiens
gctccatccttgtatcacttgagtcaccacaat

SEQ ID NO: 35031 - DNA, 33 bp, Homo sapiens
cagacactgtatcacacctagacctctctcttt

SEQ ID NO: 35032 - DNA, 51 bp, Homo sapiens
tagagtgtatttatcacaaattataagtattacacacattttctgaaatgg

SEQ ID NO: 35033 - DNA, 33 bp, Homo sapiens
actggacagtaacttaaagccgtatgaagagat

SEQ ID NO: 35034 - DNA, 33 bp, Homo sapiens
ctttgaaaaaatgtaactgaaaatgtgttgtga

SEQ ID NO: 35035 - DNA, 33 bp, Homo sapiens
tacagcagtttttcaaagtttaatcattcatga

SEQ ID NO: 35036 - DNA, 33 bp, Homo sapiens
gtgtcttacacacttcaaccttaacctctggta

SEQ ID NO: 35037 - DNA, 33 bp, Homo sapiens
tgggaaatttagatcacgagacagtacagcaca

SEQ ID NO: 35038 - DNA, 33 bp, Homo sapiens
aaatcgagaaacagcacgaatattgaaggagtt

SEQ ID NO: 35039 - DNA, 33 bp, Homo sapiens
aagccattttcaaagtcaagttcagggtacctc

SEQ ID NO: 35040 - DNA, 33 bp, Homo sapiens
gacccaaacatagtgcaaaggagattaaaaaaa

SEQ ID NO: 35041 - DNA, 33 bp, Homo sapiens
tatcagaaggaaatgacgaggagaatcaaggaa

SEQ ID NO: 35042 - DNA, 33 bp, Homo sapiens
tcactgatgtgcttacaaactatattcctgatt

SEQ ID NO: 35043 - DNA, 33 bp, Homo sapiens
ctttatcaagttagtacagtataaagtgctgaa

SEQ ID NO: 35044 - DNA, 33 bp, Homo sapiens
actgctaccttgataacgacatagtagtttgaa

SEQ ID NO: 35045 - DNA, 33 bp, Homo sapiens
cagtttaaggcacttaagaatcatttacattaa

SEQ ID NO: 35046 - DNA, 51 bp, Homo sapiens
ctttggtaaaatgagtttttgacccacctcttacagactcacaatatgtac

SEQ ID NO: 35047 - DNA, 33 bp, Homo sapiens
taactgcgttgttgtaaaggacttgaccccggt

SEQ ID NO: 35048 - DNA, 33 bp, Homo sapiens
aataatagcattaaacagagaaagcatgaatct

SEQ ID NO: 35049 - DNA, 33 bp, Homo sapiens
gttggctctttggtgccaattttcattactatg

SEQ ID NO: 35050 - DNA, 33 bp, Homo sapiens
gataagtgatgccatacatataatagcagtaag

SEQ ID NO: 35051 - DNA, 33 bp, Homo sapiens
taacaacatctcgaacactgatttcattcccca

SEQ ID NO: 35052 - DNA, 33 bp, Homo sapiens
cgtcaaatcgtcataaatcaattaaccttgagg

SEQ ID NO: 35053 - DNA, 33 bp, Homo sapiens
tctgtaggtttcattgcactatttcataccgta

SEQ ID NO: 35054 - DNA, 33 bp, Homo sapiens
cctaatataccacaaactggacaggatggagat

SEQ ID NO: 35055 - DNA, 51 bp, Homo sapiens
tcatttgggtaaataccaaggagcacaactgttgaatcacatggtaagaat

SEQ ID NO: 35056 - DNA, 33 bp, Homo sapiens
aaatagacggttaaagcaggatgccttgagcca

SEQ ID NO: 35057 - DNA, 33 bp, Homo sapiens
ttttgcacaacagagaagtttgcaaaatcacaa

SEQ ID NO: 35058 - DNA, 33 bp, Homo sapiens
gtcttttgaaaatgaaataaaagaggtctatgg

SEQ ID NO: 35059 - DNA, 51 bp, Homo sapiens
tgatggggaataggtgatgggagaaaaaaagtatcatatattaaatagcag

SEQ ID NO: 35060 - DNA, 33 bp, Homo sapiens
ttctgcagagaccaaacagaagtaaggtattaa

SEQ ID NO: 35061 - DNA, 33 bp, Homo sapiens
tggtggccttcattaccgggtagtgtgttcctt

SEQ ID NO: 35062 - DNA, 51 bp, Homo sapiens
cacatggaatgttcgagttctgtatcaacatgggattgttgttttctaagc

SEQ ID NO: 35063 - DNA, 33 bp, Homo sapiens
ggactgcgcaccctgggaattttacgcaacaga

SEQ ID NO: 35064 - DNA, 33 bp, Homo sapiens
agacgtttctttaactcaccgatttcaatcttt

SEQ ID NO: 35065 - DNA, 33 bp, Homo sapiens
cctggatttggcatcaacacttagttaagtagg

SEQ ID NO: 35066 - DNA, 33 bp, Homo sapiens
aaacatctttttttagcaaccattatacagaca

SEQ ID NO: 35067 - DNA, 33 bp, Homo sapiens
gcgttggctgctggcacaatgtttgtaatttct

SEQ ID NO: 35068 - DNA, 33 bp, Homo sapiens
actctaaccattaccaaaatcatattctcatgg

SEQ ID NO: 35069 - DNA, 33 bp, Homo sapiens
actttcatcctctttaggtaagtgaccctgaag

SEQ ID NO: 35070 - DNA, 33 bp, Homo sapiens
tatgtctacacttgcacgaacttctctggagaa

SEQ ID NO: 35071 - DNA, 33 bp, Homo sapiens
aggactgatgttcttacgaggagacacacacac

SEQ ID NO: 35072 - DNA, 33 bp, Homo sapiens
gtggctgggtttaaaagcttaggatcagccggg

SEQ ID NO: 35073 - DNA, 33 bp, Homo sapiens
agaatacagttgatgaagctcttcttgaaaaac

SEQ ID NO: 35074 - DNA, 33 bp, Homo sapiens
gaggcctttatcctggcattgaaggatctaatt

SEQ ID NO: 35075 - DNA, 33 bp, Homo sapiens
aaaaagcagtttctgaaaattagatccttcaat

SEQ ID NO: 35076 - DNA, 33 bp, Homo sapiens
attttgaaatgttaaaatgaaggctgaactggc

SEQ ID NO: 35077 - DNA, 33 bp, Homo sapiens
tcatcattacttttcacggtaagaacagctatt

SEQ ID NO: 35078 - DNA, 33 bp, Homo sapiens
aaatgtcattccaccacagaggcatagaagaaa

SEQ ID NO: 35079 - DNA, 33 bp, Homo sapiens
actccttatattcacaatgataacatgagcatt

SEQ ID NO: 35080 - DNA, 33 bp, Homo sapiens
attttagctgatacagaagacattgcctccaca

SEQ ID NO: 35081 - DNA, 33 bp, Homo sapiens
gaaattgtttttctgacagttggtaggttctat

SEQ ID NO: 35082 - DNA, 51 bp, Homo sapiens
acatgtattatcttcccacgatcagcttcaagaaccttcatgattctgtca

SEQ ID NO: 35083 - DNA, 33 bp, Homo sapiens
atgtttcctacgtgtacaagaattcacatgagc

SEQ ID NO: 35084 - DNA, 33 bp, Homo sapiens
ttgcataagctaaataccagatgtcttatccat

SEQ ID NO: 35085 - DNA, 33 bp, Homo sapiens
ccttttagcttccccaatcttcctgttaacacc

SEQ ID NO: 35086 - DNA, 33 bp, Homo sapiens
caagtatccaaacagcaccttttaaatctagac

SEQ ID NO: 35087 - DNA, 33 bp, Homo sapiens
ttctaacataaaatgacgtgaaatgctaaaata

SEQ ID NO: 35088 - DNA, 33 bp, Homo sapiens
gccagataaacataaccgtcacactaaaggcca

SEQ ID NO: 35089 - DNA, 33 bp, Homo sapiens
tagatgttctcaaaagcctctctggtgtggctg

SEQ ID NO: 35090 - DNA, 33 bp, Homo sapiens
gagcagacataattcaatatataacaagctgta

SEQ ID NO: 35091 - DNA, 33 bp, Homo sapiens
ttaaagagagaattaacgtaaaatgtgtgggtg

SEQ ID NO: 35092 - DNA, 51 bp, Homo sapiens
ctaaaccttgtagacaagtgagtcacctgatatgtatagaagctgtgatat

SEQ ID NO: 35093 - DNA, 33 bp, Homo sapiens
tgtatgggtgtcatccaggaagaactggcaata

SEQ ID NO: 35094 - DNA, 33 bp, Homo sapiens
cagtgccaggctcagaaaatatttgtaataata

SEQ ID NO: 35095 - DNA, 33 bp, Homo sapiens
cattttaggacaataaatagctgcatggtctct

SEQ ID NO: 35096 - DNA, 33 bp, Homo sapiens
cctctgcatctaagagcaataaaaaggttacac

SEQ ID NO: 35097 - DNA, 33 bp, Homo sapiens
aaaatagcaggattcagtgaaaggtataaacgt

SEQ ID NO: 35098 - DNA, 33 bp, Homo sapiens
agaagacaggaaagcaacgccgtgctaggggaa

SEQ ID NO: 35099 - DNA, 33 bp, Homo sapiens
gcaagagtcacccacaatgagtctggtttaggt

SEQ ID NO: 35100 - DNA, 33 bp, Homo sapiens
agccggaagtctgagacggtctgttttcaagaa

SEQ ID NO: 35101 - DNA, 33 bp, Homo sapiens
cctgacaatgaaaaaacggtttgttcagggatt

SEQ ID NO: 35102 - DNA, 33 bp, Homo sapiens
ggtttcagttccgccaaactctccctcagtcct

SEQ ID NO: 35103 - DNA, 33 bp, Homo sapiens
gggaacgctaggaccacgaggggccatcagtga

SEQ ID NO: 35104 - DNA, 33 bp, Homo sapiens
ccctctgcctggaatgcacggtccatgtttcac

SEQ ID NO: 35105 - DNA, 33 bp, Homo sapiens
cacaatcatgccctaactcgaagacaactcagt

SEQ ID NO: 35106 - DNA, 33 bp, Homo sapiens
tggaataaacaaagtccatcatgccaggcagct

SEQ ID NO: 35107 - DNA, 33 bp, Homo sapiens
aagacccatctatgtgaaacatcagcattcctg

SEQ ID NO: 35108 - DNA, 33 bp, Homo sapiens
agtgtatcctgatgtgcataagactgaatactc

SEQ ID NO: 35109 - DNA, 33 bp, Homo sapiens
aaggtgtcccggaaagcagatttaatcctgtct

SEQ ID NO: 35110 - DNA, 33 bp, Homo sapiens
actcttaacctgaagcacaagtgacagaaaacc

SEQ ID NO: 35111 - DNA, 33 bp, Homo sapiens
tgacattgtagtgataagaaaatgagatgcggg

SEQ ID NO: 35112 - DNA, 33 bp, Homo sapiens
gattaatgctaattccactaatgagcactaatg

SEQ ID NO: 35113 - DNA, 33 bp, Homo sapiens
catttcccaaatgcctcagcggttgtcttaaca

SEQ ID NO: 35114 - DNA, 33 bp, Homo sapiens
tcagttacagtcactacgacctcattttaaaag

SEQ ID NO: 35115 - DNA, 33 bp, Homo sapiens
aaaaccatgaaaaaaaatcaagacaacttcctg

SEQ ID NO: 35116 - DNA, 33 bp, Homo sapiens
ctttgatttctcgattcaaaacacaagcaaaca

SEQ ID NO: 35117 - DNA, 33 bp, Homo sapiens
gggaagatgatactgacccaggcaagacgcatg

SEQ ID NO: 35118 - DNA, 33 bp, Homo sapiens
cccaggcctctttgcaacttggtggtctcaggt

SEQ ID NO: 35119 - DNA, 33 bp, Homo sapiens
ggggtaacaggtcccacgaaagtccaaagccca

SEQ ID NO: 35120 - DNA, 33 bp, Homo sapiens
gtggccacgaacccatcagagttacagatcctc

SEQ ID NO: 35121 - DNA, 33 bp, Homo sapiens
taaacaggttttttcaagaactgcgagactgtt

SEQ ID NO: 35122 - DNA, 33 bp, Homo sapiens
aaagctagagttagaagacgccattgagaccat

SEQ ID NO: 35123 - DNA, 33 bp, Homo sapiens
gaatgaagtgtttggaaaccatagctgcttttt

SEQ ID NO: 35124 - DNA, 33 bp, Homo sapiens
atgagcgattaagtgcaattttgatgtagggaa

SEQ ID NO: 35125 - DNA, 33 bp, Homo sapiens
ggataggggaaagctccatgaatgtaagatctg

SEQ ID NO: 35126 - DNA, 33 bp, Homo sapiens
ggggctagcgttgccacctctccctattaaact

SEQ ID NO: 35127 - DNA, 33 bp, Homo sapiens
ctcctactagagctacaatacttttcggccctt

SEQ ID NO: 35128 - DNA, 33 bp, Homo sapiens
caaagaaaggcaaagaagtcaagtccttgcaca

SEQ ID NO: 35129 - DNA, 33 bp, Homo sapiens
ttctgaggcattaatcaatctaccactcctctt

SEQ ID NO: 35130 - DNA, 33 bp, Homo sapiens
acaatttcaacagtccactaactggtttccttg

SEQ ID NO: 35131 - DNA, 33 bp, Homo sapiens
ttcaaggaactcagtaaatgtttgtcaagcgaa

SEQ ID NO: 35132 - DNA, 33 bp, Homo sapiens
aaccagcagcaatgaaataaatgagtgaatatg

SEQ ID NO: 35133 - DNA, 33 bp, Homo sapiens
cctccctcttgctgcaaaatttcccaggggtgt

SEQ ID NO: 35134 - DNA, 33 bp, Homo sapiens
tcctctgtgcctggacactttgttgcttcctca

SEQ ID NO: 35135 - DNA, 33 bp, Homo sapiens
tcttggatctggttgacctctttggtccgagta

SEQ ID NO: 35136 - DNA, 51 bp, Homo sapiens
cctggtgactcccactcctggtgtacaagaggctccatcaatccaattatt

SEQ ID NO: 35137 - DNA, 33 bp, Homo sapiens
tgtggaacatattaccaactttaggctagagta

SEQ ID NO: 35138 - DNA, 33 bp, Homo sapiens
gccgaggatggcgattcaagtaagagtagcttt

SEQ ID NO: 35139 - DNA, 51 bp, Homo sapiens
tatgctaagtgaaagaagtcagtcactacagaccacatattatatgatgcc

SEQ ID NO: 35140 - DNA, 33 bp, Homo sapiens
cattaagctcttagcacagtttagtcggatacc

SEQ ID NO: 35141 - DNA, 33 bp, Homo sapiens
aagaaaaatttgaaacagttgcaatgaccagca

SEQ ID NO: 35142 - DNA, 33 bp, Homo sapiens
catttctcctggcatcgctagctcttttagatg

SEQ ID NO: 35143 - DNA, 33 bp, Homo sapiens
agaggaagggatgtgaaaatacagatcatgaca

SEQ ID NO: 35144 - DNA, 33 bp, Homo sapiens
atcacaactcagttacaataaaatacttgacac

SEQ ID NO: 35145 - DNA, 33 bp, Homo sapiens
ggtagtggcatatagaaagagacctgcaggtcc

SEQ ID NO: 35146 - DNA, 51 bp, Homo sapiens
ggctgtcaagatctaacatcaccaaagctagcccaccactcccagtctaaa

SEQ ID NO: 35147 - DNA, 33 bp, Homo sapiens
gaaaaggtccaaattaaaggtgatggcaagcac

SEQ ID NO: 35148 - DNA, 33 bp, Homo sapiens
ttcctaccacagactggcaaaaacatcttctgg

SEQ ID NO: 35149 - DNA, 33 bp, Homo sapiens
ggcccagactctcacacaggttttagagggagt

SEQ ID NO: 35150 - DNA, 51 bp, Homo sapiens
tgctacaactgcagacttagaaaaacgtggtcactcttgaggtggctaaag

SEQ ID NO: 35151 - DNA, 33 bp, Homo sapiens
aaagttcccaggcctaagaatgtgtatgtgtat

SEQ ID NO: 35152 - DNA, 33 bp, Homo sapiens
gactagggctgatttccaagcacttgagcctgg

SEQ ID NO: 35153 - DNA, 33 bp, Homo sapiens
ataatgacaacatcacacagcataactgagtat

SEQ ID NO: 35154 - DNA, 33 bp, Homo sapiens
atacagtcacttgctcaccttcattaattgcaa

SEQ ID NO: 35155 - DNA, 51 bp, Homo sapiens
gacatttgtacagtgtgatagagaaatacattggaaaaccaaagttcagaa

SEQ ID NO: 35156 - DNA, 33 bp, Homo sapiens
ccttgtgttatagtgacctcaatttctggatga

SEQ ID NO: 35157 - DNA, 33 bp, Homo sapiens
cctcaaaaatataaaacgactgtccagtgccca

SEQ ID NO: 35158 - DNA, 33 bp, Homo sapiens
tgtgaaaataggcaccagagttcaaattttatg

SEQ ID NO: 35159 - DNA, 33 bp, Homo sapiens
aggcaagtaccaggttcaaattgtgggtgtgat

SEQ ID NO: 35160 - DNA, 33 bp, Homo sapiens
cttcttctgtagctacactaattccaagtcatt

SEQ ID NO: 35161 - DNA, 33 bp, Homo sapiens
acgatcttattaatgcagattctgggttccatt

SEQ ID NO: 35162 - DNA, 33 bp, Homo sapiens
ctttaatagacaaaacagcaaacatatgtaact

SEQ ID NO: 35163 - DNA, 33 bp, Homo sapiens
ttagatcttggttcaacttccagttttaaactt

SEQ ID NO: 35164 - DNA, 33 bp, Homo sapiens
aaatgcttatcctctacctttgcaaacattaaa

SEQ ID NO: 35165 - DNA, 33 bp, Homo sapiens
catagtaaaagctcaaaacacggcagccataat

SEQ ID NO: 35166 - DNA, 33 bp, Homo sapiens
cttcccttctccaaaaaccaggagcaacttgag

SEQ ID NO: 35167 - DNA, 33 bp, Homo sapiens
taagtaaaaagagtcaatccacatgattccaac

SEQ ID NO: 35168 - DNA, 33 bp, Homo sapiens
ctattatggcatcagaaaacatgactttgtgct

SEQ ID NO: 35169 - DNA, 33 bp, Homo sapiens
gactcatgctacacacagcgtggatgaaccttg

SEQ ID NO: 35170 - DNA, 33 bp, Homo sapiens
aagagcttcaagcatccaaaaacctggtcacct

SEQ ID NO: 35171 - DNA, 33 bp, Homo sapiens
tgcatatgcaaatagaaccttggcaggtgcttg

SEQ ID NO: 35172 - DNA, 33 bp, Homo sapiens
aaaatctgaggtctccaagaaaagaaattctat

SEQ ID NO: 35173 - DNA, 51 bp, Homo sapiens
caaagactcagttgggataagagacaaggtatccagctcccagaacaaaat

SEQ ID NO: 35174 - DNA, 51 bp, Homo sapiens
tgttcttttcaaactctcttctctacctggcaggttctctgacgatccagt

SEQ ID NO: 35175 - DNA, 33 bp, Homo sapiens
gtaacaggggtgtaaacgccagccaatctcttt

SEQ ID NO: 35176 - DNA, 33 bp, Homo sapiens
gatgttgatgattggcagaaggattttatatgt

SEQ ID NO: 35177 - DNA, 33 bp, Homo sapiens
tcatcttaatgagccacaaatgtgtaattagca

SEQ ID NO: 35178 - DNA, 33 bp, Homo sapiens
cacagggagttattagacacatcaagtttccaa

SEQ ID NO: 35179 - DNA, 33 bp, Homo sapiens
ctaactgcgaaatgacagagatctcatagatgt

SEQ ID NO: 35180 - DNA, 33 bp, Homo sapiens
gcaaaacacaccaaatgaatagtcaagatcaag

SEQ ID NO: 35181 - DNA, 33 bp, Homo sapiens
aaatcatagaggtatacggcagtttcgtggact

SEQ ID NO: 35182 - DNA, 33 bp, Homo sapiens
tgtattactcatggcacgtacttatactaaaaa

SEQ ID NO: 35183 - DNA, 33 bp, Homo sapiens
ctgcgtgaagaagaaaatagatgattcatgcaa

SEQ ID NO: 35184 - DNA, 51 bp, Homo sapiens
attctggaaatcataggactgtgaaaaagaaaagacctgagagatctcata

SEQ ID NO: 35185 - DNA, 33 bp, Homo sapiens
acagaagccacttgcaccaaaaccacttacagt

SEQ ID NO: 35186 - DNA, 33 bp, Homo sapiens
aagcaattactaaagcaacagtgacttgaggtt

SEQ ID NO: 35187 - DNA, 33 bp, Homo sapiens
tgtgcgtcattcaacccattgagggtctgcata

SEQ ID NO: 35188 - DNA, 33 bp, Homo sapiens
aacagttagattgctaggattatctgttaagat

SEQ ID NO: 35189 - DNA, 51 bp, Homo sapiens
gaaaaagacaataactgaaataaaaatctcaatgaatgggctcaatagcag

SEQ ID NO: 35190 - DNA, 51 bp, Homo sapiens
attgattggctgagtctaatctaagcagtgaagtaactgggctggctgttc

SEQ ID NO: 35191 - DNA, 33 bp, Homo sapiens
aataattggcactctacaaaagggagatcttcc

SEQ ID NO: 35192 - DNA, 33 bp, Homo sapiens
aagatccgcaccgtcaaaacccatctcattaaa

SEQ ID NO: 35193 - DNA, 33 bp, Homo sapiens
tcatgccattactgtaaataaggcagtgtagga

SEQ ID NO: 35194 - DNA, 33 bp, Homo sapiens
gattttctgcaaaaccagatgatgagaagagac

SEQ ID NO: 35195 - DNA, 33 bp, Homo sapiens
ctgatcttgctgcccccactgtttgcttgagaa

SEQ ID NO: 35196 - DNA, 33 bp, Homo sapiens
gtaaatgcaaggtaaaattccagcaatgggttg

SEQ ID NO: 35197 - DNA, 33 bp, Homo sapiens
gtttctcctcaacctcactacacttattgctgt

SEQ ID NO: 35198 - DNA, 33 bp, Homo sapiens
agacgacattggcaaaatgactcagacccacag

SEQ ID NO: 35199 - DNA, 33 bp, Homo sapiens
atgtattgcaaataaaaaaacatggaaaaatct

SEQ ID NO: 35200 - DNA, 33 bp, Homo sapiens
gtctgcagtcaaatgaaagacgcttaaatgctg

SEQ ID NO: 35201 - DNA, 33 bp, Homo sapiens
tttgagatatgttctggaaccaggttattttac

SEQ ID NO: 35202 - DNA, 33 bp, Homo sapiens
tttgtgtgttgtcataagttttcaactctttcg

SEQ ID NO: 35203 - DNA, 33 bp, Homo sapiens
aatggctgataccaagcctgcagtgaaaaatgc

SEQ ID NO: 35204 - DNA, 33 bp, Homo sapiens
gaaacttggttgagcccagaattttgaaaccag

SEQ ID NO: 35205 - DNA, 33 bp, Homo sapiens
gaagaagagaacatcaagcctcttggctggact

SEQ ID NO: 35206 - DNA, 33 bp, Homo sapiens
ggtgattctgaaacacactgaaggtgaagaaca

SEQ ID NO: 35207 - DNA, 33 bp, Homo sapiens
gctgctacatggaacactggctaaaagtaggca

SEQ ID NO: 35208 - DNA, 33 bp, Homo sapiens
aaatctctgttcacataaaagcctgtccatgaa

SEQ ID NO: 35209 - DNA, 51 bp, Homo sapiens
ctcagacacgcttcctaaaatcatcagaggtgcttgcacaaattcagctac

SEQ ID NO: 35210 - DNA, 33 bp, Homo sapiens
actcgttttagaaagaaccctaacagtttgaga

SEQ ID NO: 35211 - DNA, 33 bp, Homo sapiens
gctccaaagcattgacagtagttattctaaaga

SEQ ID NO: 35212 - DNA, 33 bp, Homo sapiens
ccatctcctctattacgaaagcccctgtaagac

SEQ ID NO: 35213 - DNA, 33 bp, Homo sapiens
tttgtcaaactggaaaaacaaaacaaagcaaaa

SEQ ID NO: 35214 - DNA, 33 bp, Homo sapiens
tgatatacagcgaagaaaaaggatgaattacag

SEQ ID NO: 35215 - DNA, 33 bp, Homo sapiens
ttaagcagattggcaaatggtacgtgaggcctg

SEQ ID NO: 35216 - DNA, 33 bp, Homo sapiens
aaacttgacatatgcaatcaacgttaacatcac

SEQ ID NO: 35217 - DNA, 33 bp, Homo sapiens
gttttgagtcatttaaggctaaccatcagagtt

SEQ ID NO: 35218 - DNA, 33 bp, Homo sapiens
actgcccccagaatgacgtgagaagtccttcaa

SEQ ID NO: 35219 - DNA, 33 bp, Homo sapiens
ggatgatattaatcccaacatcgcagggaatgt

SEQ ID NO: 35220 - DNA, 33 bp, Homo sapiens
ttttagctttgtaggaaatttttttcttctcct

SEQ ID NO: 35221 - DNA, 33 bp, Homo sapiens
ccctttcagcttctgacacctttgtgcaagcct

SEQ ID NO: 35222 - DNA, 51 bp, Homo sapiens
gcttctcttgggttctctcaatgcaaatctctgttatggcaattatctgag

SEQ ID NO: 35223 - DNA, 33 bp, Homo sapiens
cattgaagcagggaaagaattggagcacaaagg

SEQ ID NO: 35224 - DNA, 33 bp, Homo sapiens
aaatactgccggtgacagaagctgcttaatcta

SEQ ID NO: 35225 - DNA, 33 bp, Homo sapiens
gatacaaatcagagagcaccctaaagaagccct

SEQ ID NO: 35226 - DNA, 33 bp, Homo sapiens
accaatgtttattggacgtaaatgtctactggg

SEQ ID NO: 35227 - DNA, 33 bp, Homo sapiens
gagaatgacttagaaccgcacagcaaaggaatt

SEQ ID NO: 35228 - DNA, 33 bp, Homo sapiens
gctttcattctttctcaaatttgtctgctctgt

SEQ ID NO: 35229 - DNA, 33 bp, Homo sapiens
gtaaacctctctaaaaatacccagaaatgcaac

SEQ ID NO: 35230 - DNA, 33 bp, Homo sapiens
aatgaaagaaaaagcccggagtaagctccaaca

SEQ ID NO: 35231 - DNA, 33 bp, Homo sapiens
tcaccattacttagatcatcacaggtagggatg

SEQ ID NO: 35232 - DNA, 33 bp, Homo sapiens
attaagtgcataacccaaatattcagaatagaa

SEQ ID NO: 35233 - DNA, 51 bp, Homo sapiens
gagtgtgtttcatgacagcacagaacttatctactttgtttattgcaatgt

SEQ ID NO: 35234 - DNA, 33 bp, Homo sapiens
tgttgcagatatcttgaaacatcatttgtgctt

SEQ ID NO: 35235 - DNA, 33 bp, Homo sapiens
tcacaataaaagttaactcatcttctcattctc

SEQ ID NO: 35236 - DNA, 33 bp, Homo sapiens
tgcacattctaactacaggacacttccttttct

SEQ ID NO: 35237 - DNA, 33 bp, Homo sapiens
catatttctagtgttacggcaatgttaactttg

SEQ ID NO: 35238 - DNA, 33 bp, Homo sapiens
cttgtaccctccgaagccaaaacctgagctgta

SEQ ID NO: 35239 - DNA, 33 bp, Homo sapiens
aagttatttagctgacgggtaaagagtctcttt

SEQ ID NO: 35240 - DNA, 33 bp, Homo sapiens
ctgaacctctagagaacacagtcaggtagatga

SEQ ID NO: 35241 - DNA, 33 bp, Homo sapiens
taaagatcaacgctaacattgcctccaaccaag

SEQ ID NO: 35242 - DNA, 51 bp, Homo sapiens
cacacacagcctcaatgacctaataagcagatttgcagagccataaccttg

SEQ ID NO: 35243 - DNA, 33 bp, Homo sapiens
ggaaatcatcatttggcaattgtatttcctctt

SEQ ID NO: 35244 - DNA, 33 bp, Homo sapiens
tatctagaaaacataccggaaaaacatccagcc

SEQ ID NO: 35245 - DNA, 33 bp, Homo sapiens
atttccacttccctcagtcaaacacatatagct

SEQ ID NO: 35246 - DNA, 33 bp, Homo sapiens
gctcagacaataaataaaaacagagtgctcagc

SEQ ID NO: 35247 - DNA, 33 bp, Homo sapiens
ttctctctggcacttaccatttatctattttat

SEQ ID NO: 35248 - DNA, 33 bp, Homo sapiens
cccactgctggtccaaaatctgctatcaccatt

SEQ ID NO: 35249 - DNA, 33 bp, Homo sapiens
gagagcagtttttaatctgtgaacgtgtaagtc

SEQ ID NO: 35250 - DNA, 33 bp, Homo sapiens
ttggattgcttgagaccgcatctgtatgcctat

SEQ ID NO: 35251 - DNA, 33 bp, Homo sapiens
tcttagtttctacacacgatgttcagacatatt

SEQ ID NO: 35252 - DNA, 33 bp, Homo sapiens
atcattgcctgcagaaaaagatggtgttaagta

SEQ ID NO: 35253 - DNA, 33 bp, Homo sapiens
ttaagaaatgtagatcaaggagctgtctaacaa

SEQ ID NO: 35254 - DNA, 33 bp, Homo sapiens
agtgcccatgttcaggcaacactaatatttgca

SEQ ID NO: 35255 - DNA, 33 bp, Homo sapiens
tactgcagtactctcgaacccaaggtctttcca

SEQ ID NO: 35256 - DNA, 33 bp, Homo sapiens
tgggctggtgccatctcaaggtgacaatggctg

SEQ ID NO: 35257 - DNA, 33 bp, Homo sapiens
acatcatgatagcagactcgccggagtaatgag

SEQ ID NO: 35258 - DNA, 33 bp, Homo sapiens
ctctaagggacattcacccaaatctgactctgg

SEQ ID NO: 35259 - DNA, 33 bp, Homo sapiens
gagtaggaaggaacagcctcattaacattcata

SEQ ID NO: 35260 - DNA, 33 bp, Homo sapiens
ctatgatgctcaagtagctaaccaggaggaaaa

SEQ ID NO: 35261 - DNA, 33 bp, Homo sapiens
tctttcacaatctaggacaaagagtatgggata

SEQ ID NO: 35262 - DNA, 33 bp, Homo sapiens
tgactgggtttccacaacctctagctttcagtt

SEQ ID NO: 35263 - DNA, 33 bp, Homo sapiens
gtagctggaaccataggagtatgcaatcacatc

SEQ ID NO: 35264 - DNA, 33 bp, Homo sapiens
tcatctcgccttgtcaaggaatgtaagaaatcc

SEQ ID NO: 35265 - DNA, 33 bp, Homo sapiens
tttgatagagttaaccactttcttcttcttgat

SEQ ID NO: 35266 - DNA, 51 bp, Homo sapiens
aaattaccaggacttaaggcaggaggcatacgctaaccgtgctgttttgtg

SEQ ID NO: 35267 - DNA, 33 bp, Homo sapiens
acatcaagggaacctacagtggaattaaatatc

SEQ ID NO: 35268 - DNA, 33 bp, Homo sapiens
gatgtttgttacacacacaattcatttcctaat

SEQ ID NO: 35269 - DNA, 33 bp, Homo sapiens
gatacttggaatgtccagactacaggaacaaag

SEQ ID NO: 35270 - DNA, 33 bp, Homo sapiens
ctgtttcaatattagacgtgaagaggactgatt

SEQ ID NO: 35271 - DNA, 33 bp, Homo sapiens
tgccaaccaatccacaggaccaccctatttgaa

SEQ ID NO: 35272 - DNA, 33 bp, Homo sapiens
tatcttattgacatgcccattgacagctcttac

SEQ ID NO: 35273 - DNA, 33 bp, Homo sapiens
catgcttcttgctccaacttaatttgtccctta

SEQ ID NO: 35274 - DNA, 33 bp, Homo sapiens
cacagccaaactaagcaagtagtattatagaat

SEQ ID NO: 35275 - DNA, 33 bp, Homo sapiens
aaatgtatacaataaacgtgaacccagctgagt

SEQ ID NO: 35276 - DNA, 51 bp, Homo sapiens
catcaatttaaatcagcctcagaataggaatagcataatttccattgactc

SEQ ID NO: 35277 - DNA, 33 bp, Homo sapiens
ttatcattcctgttacagctagcataaaaacca

SEQ ID NO: 35278 - DNA, 33 bp, Homo sapiens
gctcttaacactttacaccatggtttatccaac

SEQ ID NO: 35279 - DNA, 33 bp, Homo sapiens
ttcttttctcggtgtacattcttggtgcctttg

SEQ ID NO: 35280 - DNA, 33 bp, Homo sapiens
taatgttagccactgacacaatacatacattcc

SEQ ID NO: 35281 - DNA, 51 bp, Homo sapiens
cacagggtaacaagaagataattcccaaagagttggtgcttttgttttgta

SEQ ID NO: 35282 - DNA, 51 bp, Homo sapiens
ctttgccttctctaaagatccatggacatttttatttggtcacagaggcct

SEQ ID NO: 35283 - DNA, 33 bp, Homo sapiens
cctcttgttgaaagtgcagagcaacattacagt

SEQ ID NO: 35284 - DNA, 33 bp, Homo sapiens
cattccatatcctcgacgtcctgctggaacaat

SEQ ID NO: 35285 - DNA, 33 bp, Homo sapiens
tgttctaccaattaaagacagggctaggtagaa

SEQ ID NO: 35286 - DNA, 33 bp, Homo sapiens
gctttggaattactacaactcttggccatgaag

SEQ ID NO: 35287 - DNA, 33 bp, Homo sapiens
tcaactctcaccacaaacctactgctcccattt

SEQ ID NO: 35288 - DNA, 33 bp, Homo sapiens
tcatccagctcctaacaactgtgggatctgcct

SEQ ID NO: 35289 - DNA, 33 bp, Homo sapiens
aagccttgcgctttaaataacaggggagcttcc

SEQ ID NO: 35290 - DNA, 33 bp, Homo sapiens
ctaatctagctctttgcaggaaatgctaagtta

SEQ ID NO: 35291 - DNA, 33 bp, Homo sapiens
gcaggaaaggaagtggaaagtcctctgatatca

SEQ ID NO: 35292 - DNA, 33 bp, Homo sapiens
ctggctctggggtttcaagcaagtcacattctg

SEQ ID NO: 35293 - DNA, 33 bp, Homo sapiens
gctgcagacctgcaaacgtaatatattctgttg

SEQ ID NO: 35294 - DNA, 33 bp, Homo sapiens
gctccttcacacctaaatattaaaagccctagc

SEQ ID NO: 35295 - DNA, 33 bp, Homo sapiens
gaaactgaggttacacagtcggatacctgtcag

SEQ ID NO: 35296 - DNA, 33 bp, Homo sapiens
ctttactgactatttcactttttgccctggaaa

SEQ ID NO: 35297 - DNA, 33 bp, Homo sapiens
tctaagtaggtgtattcaacaagttttggaagg

SEQ ID NO: 35298 - DNA, 51 bp, Homo sapiens
ttcataagttctaacaaacctctgacagaagctgtttccagccctttcatc

SEQ ID NO: 35299 - DNA, 33 bp, Homo sapiens
ctgtacattgatctgaacttcattaaccttgct

SEQ ID NO: 35300 - DNA, 33 bp, Homo sapiens
ttaaaaggcactttgcaaaaaattacaaaaata

SEQ ID NO: 35301 - DNA, 33 bp, Homo sapiens
atcaagtaataaataacgtgcaaccagctgccc

SEQ ID NO: 35302 - DNA, 33 bp, Homo sapiens
cattcatttcttcaacaagtatttagctcctac

SEQ ID NO: 35303 - DNA, 33 bp, Homo sapiens
ccaggtgtccagccacccactttgtctcaggtg

SEQ ID NO: 35304 - DNA, 33 bp, Homo sapiens
gtacgggaaaagtagacgtcaatcaggtggaaa

SEQ ID NO: 35305 - DNA, 33 bp, Homo sapiens
ctctgaggttggttctgaatgctcacaaagcta

SEQ ID NO: 35306 - DNA, 51 bp, Homo sapiens
gggtcctctatcaaatggcaactgaataataggaccttcctccaactgttg

SEQ ID NO: 35307 - DNA, 33 bp, Homo sapiens
acgtggtgtgcccaacaaggaaccacatggggc

SEQ ID NO: 35308 - DNA, 33 bp, Homo sapiens
atgcctcctatttttacgcgctggctgcaccca

SEQ ID NO: 35309 - DNA, 33 bp, Homo sapiens
tgtttatttctcagccactaatggattgtttga

SEQ ID NO: 35310 - DNA, 33 bp, Homo sapiens
gtatcataagcacaaaattatgacttcacaaga

SEQ ID NO: 35311 - DNA, 33 bp, Homo sapiens
ttcccaaccctgctcagatgctatggaacttag

SEQ ID NO: 35312 - DNA, 33 bp, Homo sapiens
gtgccatggattctgacaaagcctccatctccc

SEQ ID NO: 35313 - DNA, 33 bp, Homo sapiens
cgatgttttagatagagaggaacttagaaaatt

SEQ ID NO: 35314 - DNA, 33 bp, Homo sapiens
gcatggcacggactgacaggttacatgggaaac

SEQ ID NO: 35315 - DNA, 33 bp, Homo sapiens
gccctgtctcactagcagattgaccatgagtac

SEQ ID NO: 35316 - DNA, 33 bp, Homo sapiens
aattttgcagaaagaaacattgcaggaagtttt

SEQ ID NO: 35317 - DNA, 33 bp, Homo sapiens
catgggaatgctgcaaagttaatggaagagagg

SEQ ID NO: 35318 - DNA, 33 bp, Homo sapiens
agacaatgaggtgcacagagttaagtaggagca

SEQ ID NO: 35319 - DNA, 33 bp, Homo sapiens
gacaggagcagcccacaagtcatatggccttag

SEQ ID NO: 35320 - DNA, 33 bp, Homo sapiens
caaatgcaataaacacacattcttatccacact

SEQ ID NO: 35321 - DNA, 33 bp, Homo sapiens
ggggtgagtcattaaccgcggtcctggtgctgg

SEQ ID NO: 35322 - DNA, 33 bp, Homo sapiens
tccccacgataaaagcacacacaaacagcaggt

SEQ ID NO: 35323 - DNA, 33 bp, Homo sapiens
tcattagtttagaagtaaccttagctgaagttt

SEQ ID NO: 35324 - DNA, 33 bp, Homo sapiens
agggaactggccattacgaccagtggatagagt

SEQ ID NO: 35325 - DNA, 33 bp, Homo sapiens
tgccactccctattgaagtccgagttgatttta

SEQ ID NO: 35326 - DNA, 33 bp, Homo sapiens
acattagatctctagaagtattcatcccacata

SEQ ID NO: 35327 - DNA, 33 bp, Homo sapiens
atgaatacaggagataagtacatgaaggtgctc

SEQ ID NO: 35328 - DNA, 33 bp, Homo sapiens
gattgtactttgattacgtgcaggaatttagct

SEQ ID NO: 35329 - DNA, 33 bp, Homo sapiens
tgaccaagggaagacacaaatggctatttaaat

SEQ ID NO: 35330 - DNA, 33 bp, Homo sapiens
tatgtacaaagcaggaagaccataattatctct

SEQ ID NO: 35331 - DNA, 33 bp, Homo sapiens
acatcatcattaaacaagaagagatgtggaatc

SEQ ID NO: 35332 - DNA, 33 bp, Homo sapiens
aagtgaacaaaaacataagccaaagacaatgac

SEQ ID NO: 35333 - DNA, 33 bp, Homo sapiens
gtcacatgaccatgtagtacaatgtatgcatgc

SEQ ID NO: 35334 - DNA, 33 bp, Homo sapiens
gtgaccttgaaaaatgaaaggaggacatcttcc

SEQ ID NO: 35335 - DNA, 33 bp, Homo sapiens
ttattaaacatgatacacaaagtacagtgaaaa

SEQ ID NO: 35336 - DNA, 33 bp, Homo sapiens
aataatcagttgaaaacgaaaatgtaagatatc

SEQ ID NO: 35337 - DNA, 33 bp, Homo sapiens
aggttgacttcacttcaccatatattgatatcc

SEQ ID NO: 35338 - DNA, 33 bp, Homo sapiens
aagcttacttctttgcaaactactcattcccag

SEQ ID NO: 35339 - DNA, 33 bp, Homo sapiens
tagcctcaatcaaataacagcctcttaagtgag

SEQ ID NO: 35340 - DNA, 33 bp, Homo sapiens
tcaatgtgataaagagaatctacgaaaacatac

SEQ ID NO: 35341 - DNA, 33 bp, Homo sapiens
aatatgtaccttggaggcaactatttaagcatc

SEQ ID NO: 35342 - DNA, 33 bp, Homo sapiens
gctcatttgtaaactcacaaccaactatgtgcc

SEQ ID NO: 35343 - DNA, 51 bp, Homo sapiens
caatgcagttgaaagcagtgataaacgcaatgggacaataatgtaggctag

SEQ ID NO: 35344 - DNA, 33 bp, Homo sapiens
ctgtcattgataattcactttcactctcaggtg

SEQ ID NO: 35345 - DNA, 33 bp, Homo sapiens
atttcagattatagaacagcgtgcgggtttcga

SEQ ID NO: 35346 - DNA, 33 bp, Homo sapiens
tctgtagagagccttgaacagtgtctgagattt

SEQ ID NO: 35347 - DNA, 33 bp, Homo sapiens
aaaagaacacaacagacatttctcagataacaa

SEQ ID NO: 35348 - DNA, 33 bp, Homo sapiens
aatgcagcgagaaagacatcatgaacctcaggc

SEQ ID NO: 35349 - DNA, 33 bp, Homo sapiens
tgatctgaatgtcaaacgatttcttctaattga

SEQ ID NO: 35350 - DNA, 33 bp, Homo sapiens
gcccctaaattttaaccaggcaaatggtctccc

SEQ ID NO: 35351 - DNA, 33 bp, Homo sapiens
gaaacaaactctcatacggatttccactaagga

SEQ ID NO: 35352 - DNA, 33 bp, Homo sapiens
ttatgagacgactccaagaatctttgcttttgg

SEQ ID NO: 35353 - DNA, 33 bp, Homo sapiens
tgaatatgggaaacaacatgtagtagctttatt

SEQ ID NO: 35354 - DNA, 33 bp, Homo sapiens
gagcatttgaacactgaaagaattgctttgaac

SEQ ID NO: 35355 - DNA, 33 bp, Homo sapiens
gtggaaatgctgtagaaggtaagtactgccaca

SEQ ID NO: 35356 - DNA, 33 bp, Homo sapiens
gtcagagcacaacacaagctatttggtttcctt

SEQ ID NO: 35357 - DNA, 33 bp, Homo sapiens
tcatagactaaaacaacagaatcctgtaaaaag

SEQ ID NO: 35358 - DNA, 33 bp, Homo sapiens
ggtctttctcactcaaaaattctatgcttctgt

SEQ ID NO: 35359 - DNA, 33 bp, Homo sapiens
ggtagaactcactaccaaggatcgttgaaacct

SEQ ID NO: 35360 - DNA, 33 bp, Homo sapiens
ataggaacagataagaacaccttaaagtccttt

SEQ ID NO: 35361 - DNA, 33 bp, Homo sapiens
tatttgtattctcccaaatgaatgtaaaaaggt

SEQ ID NO: 35362 - DNA, 33 bp, Homo sapiens
aaggaataccattagcactctttgtgaagttta

SEQ ID NO: 35363 - DNA, 33 bp, Homo sapiens
acacacacattaacaacactcatgtcaacacat

SEQ ID NO: 35364 - DNA, 33 bp, Homo sapiens
acactcatgggcttaacgtcacacggaagtcaa

SEQ ID NO: 35365 - DNA, 33 bp, Homo sapiens
aaaaaaaataaagctacagatgtgtctttcggc

SEQ ID NO: 35366 - DNA, 33 bp, Homo sapiens
acggtgtcaaggcaatcaggggagaaccacaac

SEQ ID NO: 35367 - DNA, 33 bp, Homo sapiens
atgggagagtgtgttgcagttaacggctgcagg

SEQ ID NO: 35368 - DNA, 33 bp, Homo sapiens
taaggccaggaggactaaaataagcacattaga

SEQ ID NO: 35369 - DNA, 33 bp, Homo sapiens
tcagacaacgagaaacggctacattaaagtaca

SEQ ID NO: 35370 - DNA, 33 bp, Homo sapiens
aggagtgacactgtgaaaagaagtcctgagaga

SEQ ID NO: 35371 - DNA, 33 bp, Homo sapiens
gcatatacttgtttcacaggcatctcaaaatcc

SEQ ID NO: 35372 - DNA, 33 bp, Homo sapiens
ttctttttgaggtgatcaacatttttggaaaac

SEQ ID NO: 35373 - DNA, 33 bp, Homo sapiens
catgaactaggtaaaacaggccagacacaaaag

SEQ ID NO: 35374 - DNA, 33 bp, Homo sapiens
tctccctgtgcaagacagcaaatttctacctct

SEQ ID NO: 35375 - DNA, 33 bp, Homo sapiens
tgtatgtgtctatgtacgggttctctcacacac

SEQ ID NO: 35376 - DNA, 33 bp, Homo sapiens
gacagaaaataattgccgaatttgacagtaagg

SEQ ID NO: 35377 - DNA, 33 bp, Homo sapiens
tggcatgcttgaagtaacagattttgaatgaaa

SEQ ID NO: 35378 - DNA, 33 bp, Homo sapiens
caggatagaccacatactaggcccacagaacaa

SEQ ID NO: 35379 - DNA, 33 bp, Homo sapiens
agtcatgtggatatccagctcctaacaaccact

SEQ ID NO: 35380 - DNA, 33 bp, Homo sapiens
aggtaaaataattgcaagtgtgattcaaaagca

SEQ ID NO: 35381 - DNA, 33 bp, Homo sapiens
tgagtttaaacagtcacccaagacagactcagc

SEQ ID NO: 35382 - DNA, 33 bp, Homo sapiens
ttacgattttgcagaaacattaatttttggtta

SEQ ID NO: 35383 - DNA, 51 bp, Homo sapiens
gtaatcttatagaaactataggcacaaaagttaaacattaaatgtgaaaat

SEQ ID NO: 35384 - DNA, 51 bp, Homo sapiens
aaatgattttcaaacagtgggataaatagtattgagagaaaagttgcattg

SEQ ID NO: 35385 - DNA, 33 bp, Homo sapiens
tctgacactaagaggaaacatccaggcatcgca

SEQ ID NO: 35386 - DNA, 33 bp, Homo sapiens
gtttattattaacgccgcagactttggggatag

SEQ ID NO: 35387 - DNA, 33 bp, Homo sapiens
tatcaaaaacataagacagatagtgtgtacaac

SEQ ID NO: 35388 - DNA, 33 bp, Homo sapiens
aaaagttgtaactattaaaaccagaaaacctca

SEQ ID NO: 35389 - DNA, 33 bp, Homo sapiens
tgtgggagctaaaggaccaaaaattgggaaagt

SEQ ID NO: 35390 - DNA, 33 bp, Homo sapiens
gtgacctattgtgagacggcccctgggactgat

SEQ ID NO: 35391 - DNA, 33 bp, Homo sapiens
tattaaagaagccaagactaagttctcaataaa

SEQ ID NO: 35392 - DNA, 33 bp, Homo sapiens
tgttgcagctgtccaacctctctggcattctag

SEQ ID NO: 35393 - DNA, 51 bp, Homo sapiens
caagccctagtctgcttattaaatcagaattccaggggcagcggcttgcct

SEQ ID NO: 35394 - DNA, 33 bp, Homo sapiens
cttttagcttcacgacaactgtcatctgcagag

SEQ ID NO: 35395 - DNA, 33 bp, Homo sapiens
gggcatgacatttgggaagcccactgtccagct

SEQ ID NO: 35396 - DNA, 33 bp, Homo sapiens
gtccttcccagaagccacttattcattgctgca

SEQ ID NO: 35397 - DNA, 33 bp, Homo sapiens
gttcgattgaaattgaccattgtgaatacagtg

SEQ ID NO: 35398 - DNA, 33 bp, Homo sapiens
gtagtgataatagcccaataagtcttattcttg

SEQ ID NO: 35399 - DNA, 33 bp, Homo sapiens
ggacttttagaaatgcaagaatatgaggaatat

SEQ ID NO: 35400 - DNA, 33 bp, Homo sapiens
ctatcaaaaaaccctacctcaactggacagatt

SEQ ID NO: 35401 - DNA, 33 bp, Homo sapiens
tagatatcccaaggtccgaattctaattgtaat

SEQ ID NO: 35402 - DNA, 33 bp, Homo sapiens
agccagagatgtagcaaggaagcaaaagtgcag

SEQ ID NO: 35403 - DNA, 33 bp, Homo sapiens
ctgtgtggcgttcatgcatctcagagggtgtag

SEQ ID NO: 35404 - DNA, 33 bp, Homo sapiens
tgaatcctaagttctaaccaggacaattttcta

SEQ ID NO: 35405 - DNA, 33 bp, Homo sapiens
ggaagtgtgttgctaaaaatgctaaaaatttaa

SEQ ID NO: 35406 - DNA, 33 bp, Homo sapiens
cccctgcctcgggacaacagaggaccagtcctc

SEQ ID NO: 35407 - DNA, 51 bp, Homo sapiens
acacatcatgatcacctagaatccacagtttacaacgcctttggtgctgta

SEQ ID NO: 35408 - DNA, 33 bp, Homo sapiens
aattggatatccatacagaagaaagctagcatc

SEQ ID NO: 35409 - DNA, 33 bp, Homo sapiens
ctatgcttggccctaaatatatcacccatcggc

SEQ ID NO: 35410 - DNA, 33 bp, Homo sapiens
atgttaacaatggttaccgctggagaatggact

SEQ ID NO: 35411 - DNA, 51 bp, Homo sapiens
tggacactgtggtgccatttggacaagattcaattatttattaaatttcac

SEQ ID NO: 35412 - DNA, 51 bp, Homo sapiens
ttccatcttcccttcaaatgtagccgcaatttctccagaaagtgtgtaggt

SEQ ID NO: 35413 - DNA, 51 bp, Homo sapiens
aggactcccgccagagctgtgggaaccttgcttcacaataggaaatctggt

SEQ ID NO: 35414 - DNA, 33 bp, Homo sapiens
caggctgagaacatccaaggaatagcaaggagc

SEQ ID NO: 35415 - DNA, 33 bp, Homo sapiens
tcaaaggaaaccaatcaaaatgcaaatcagcta

SEQ ID NO: 35416 - DNA, 33 bp, Homo sapiens
ctcatccagaatctaaccacattttgctctgtt

SEQ ID NO: 35417 - DNA, 33 bp, Homo sapiens
tcttcaagcaatcttaacagaattttcagtcat

SEQ ID NO: 35418 - DNA, 33 bp, Homo sapiens
gcccagtctccatcaactgttgaatctcccaat

SEQ ID NO: 35419 - DNA, 33 bp, Homo sapiens
aggactatgagaaagacagatgctgcggaggcc

SEQ ID NO: 35420 - DNA, 33 bp, Homo sapiens
gacttactaagcaggactcccttgccttctaga

SEQ ID NO: 35421 - DNA, 33 bp, Homo sapiens
tttgttgtctgacagaccttgcaattttaaata

SEQ ID NO: 35422 - DNA, 33 bp, Homo sapiens
aattctaaactaagacacatacatttgagaggg

SEQ ID NO: 35423 - DNA, 33 bp, Homo sapiens
atgtagctcttttatccctgtacctatcttatt

SEQ ID NO: 35424 - DNA, 33 bp, Homo sapiens
tttgcagctacatacacagggtcagagaatgtt

SEQ ID NO: 35425 - DNA, 33 bp, Homo sapiens
gcagagctggacaagtaaaaaagcagtgcagca

SEQ ID NO: 35426 - DNA, 33 bp, Homo sapiens
tctgtccagcaactcaaccatcaggtttgaaac

SEQ ID NO: 35427 - DNA, 33 bp, Homo sapiens
agtggctggatataagactctccccactgagag

SEQ ID NO: 35428 - DNA, 33 bp, Homo sapiens
cttcagctcaacacaacggttttacaatctagg

SEQ ID NO: 35429 - DNA, 33 bp, Homo sapiens
aacaaaaagttctagcaatagctgacagaatca

SEQ ID NO: 35430 - DNA, 33 bp, Homo sapiens
atcttgtcgctccccaacatattccaaagcagc

SEQ ID NO: 35431 - DNA, 33 bp, Homo sapiens
ctaaattaacattaaacgtgcttggggaaagag

SEQ ID NO: 35432 - DNA, 33 bp, Homo sapiens
agatcactcagtaagacctatgggctttggcca

SEQ ID NO: 35433 - DNA, 33 bp, Homo sapiens
gctgactttaaacataaagcaggcagcattttt

SEQ ID NO: 35434 - DNA, 51 bp, Homo sapiens
gaagtcacctctttattggcacttaacgttacgcataaataggaccactgt

SEQ ID NO: 35435 - DNA, 51 bp, Homo sapiens
gaaatgtatatgcctattcaaaaagcaaattgctacagctgctgctctaac

SEQ ID NO: 35436 - DNA, 33 bp, Homo sapiens
ccttgctcatctccacaaaaacatttgccccag

SEQ ID NO: 35437 - DNA, 33 bp, Homo sapiens
cgttgtttacacatcaacgtctaagaatattcc

SEQ ID NO: 35438 - DNA, 33 bp, Homo sapiens
gtgctgaatgaatataagtctagaaagcctaat

SEQ ID NO: 35439 - DNA, 33 bp, Homo sapiens
gaataattacaagatcaaaatccttgaggaggt

SEQ ID NO: 35440 - DNA, 33 bp, Homo sapiens
cttagataacctgacaagcagtcacatctcttc

SEQ ID NO: 35441 - DNA, 33 bp, Homo sapiens
gcaacaatatgtggacaagtagagggtaacttt

SEQ ID NO: 35442 - DNA, 33 bp, Homo sapiens
agtgacacttgacctacgcctcaaggctaacta

SEQ ID NO: 35443 - DNA, 33 bp, Homo sapiens
cttcaaatataaggaaagttgtcataaactgct

SEQ ID NO: 35444 - DNA, 33 bp, Homo sapiens
aaatctaactgcattaacctccatccatggtcc

SEQ ID NO: 35445 - DNA, 33 bp, Homo sapiens
aagatatcaccttaaccctaagtcataggctaa

SEQ ID NO: 35446 - DNA, 33 bp, Homo sapiens
acaggtgaggcattagcatggacccctgggatc

SEQ ID NO: 35447 - DNA, 33 bp, Homo sapiens
aacgccactcttctctaaaaacaattggtatca

SEQ ID NO: 35448 - DNA, 33 bp, Homo sapiens
cattcccagatagtccaatgcagttagtctata

SEQ ID NO: 35449 - DNA, 33 bp, Homo sapiens
gaagcaaccaaacttacaaaagagctatgaaga

SEQ ID NO: 35450 - DNA, 33 bp, Homo sapiens
aactttaggatttcaccgaccacaaagtatttc

SEQ ID NO: 35451 - DNA, 51 bp, Homo sapiens
ggttagatgtcatgtattcctgatccgagcactgattacatagctgtcttc

SEQ ID NO: 35452 - DNA, 33 bp, Homo sapiens
gagttctgtaaagttcaatcagatccatttggc

SEQ ID NO: 35453 - DNA, 33 bp, Homo sapiens
ttctctgtaagttctcactttagcaaaaaatgc

SEQ ID NO: 35454 - DNA, 51 bp, Homo sapiens
gagaataaaggaagaaaataatcgacccagagagtgtgatttggaggttaa

SEQ ID NO: 35455 - DNA, 33 bp, Homo sapiens
caataaaggactaaaacataagctctgtaaaaa

SEQ ID NO: 35456 - DNA, 33 bp, Homo sapiens
tcagtcttccccagtacgaaaattgctcaaaga

SEQ ID NO: 35457 - DNA, 33 bp, Homo sapiens
ccaatgaccagaaataagtagcactgtacagct

SEQ ID NO: 35458 - DNA, 33 bp, Homo sapiens
aattggggatgatgctaagaactcctagttaaa

SEQ ID NO: 35459 - DNA, 33 bp, Homo sapiens
ttaagaagctactcacaggatttcatttatgct

SEQ ID NO: 35460 - DNA, 33 bp, Homo sapiens
aatgtgacatatttgacaatgacaacacaaagg

SEQ ID NO: 35461 - DNA, 33 bp, Homo sapiens
ttctaatgtgtctgaaatgcataattgttagaa

SEQ ID NO: 35462 - DNA, 33 bp, Homo sapiens
agagatcctatgaacaactctgtctgagcatta

SEQ ID NO: 35463 - DNA, 33 bp, Homo sapiens
ggcggagttcattcctaacttagggcctcatct

SEQ ID NO: 35464 - DNA, 33 bp, Homo sapiens
ccattttgtcaaacaacttctatgtgaaacacg

SEQ ID NO: 35465 - DNA, 33 bp, Homo sapiens
aacaatgatatcaaaaacatcttaacacaacta

SEQ ID NO: 35466 - DNA, 33 bp, Homo sapiens
tcatactggcacagcaagttagtgacatgagtg

SEQ ID NO: 35467 - DNA, 33 bp, Homo sapiens
cagtttgagaactaaacgagctaatacatggaa

SEQ ID NO: 35468 - DNA, 33 bp, Homo sapiens
cctcttcttgaacataactaacttgaggaacct

SEQ ID NO: 35469 - DNA, 33 bp, Homo sapiens
gtaatgcacttcatacgatttcttcactaactc

SEQ ID NO: 35470 - DNA, 33 bp, Homo sapiens
ccaaaaacatgagaaaaccagatctccatagct

SEQ ID NO: 35471 - DNA, 33 bp, Homo sapiens
aatgagcctttgaaaacataatgcaatcatatc

SEQ ID NO: 35472 - DNA, 33 bp, Homo sapiens
agggcctggaattcaaatatgagtaacataggg

SEQ ID NO: 35473 - DNA, 51 bp, Homo sapiens
atgagaaagaacagcagggaaagtactaacatttggttcctaacatcatag

SEQ ID NO: 35474 - DNA, 33 bp, Homo sapiens
aattttagtgcacaacaaattttctgcttgtaa

SEQ ID NO: 35475 - DNA, 33 bp, Homo sapiens
tccccccatcctagtacgcaggcaaatcctgaa

SEQ ID NO: 35476 - DNA, 33 bp, Homo sapiens
cctgcgtaaggaaaaagatctagaaaggaaagg

SEQ ID NO: 35477 - DNA, 33 bp, Homo sapiens
gaatggatgaacaaacgatggtgcatgtacaga

SEQ ID NO: 35478 - DNA, 33 bp, Homo sapiens
actccctttctgagtccaaacataccaagattc

SEQ ID NO: 35479 - DNA, 51 bp, Homo sapiens
tgcagtacagtgaaattgagttccacgtactttgattattagatcctggaa

SEQ ID NO: 35480 - DNA, 33 bp, Homo sapiens
gctcggcttctatacactcttttgagcaccctc

SEQ ID NO: 35481 - DNA, 33 bp, Homo sapiens
tagagtaccatgctaacacaatactttgaaaag

SEQ ID NO: 35482 - DNA, 33 bp, Homo sapiens
ttgaggttgatattagaataagaggtgtctgtg

SEQ ID NO: 35483 - DNA, 33 bp, Homo sapiens
acaaattactgagagccatggaaattagatact

SEQ ID NO: 35484 - DNA, 33 bp, Homo sapiens
gtttaacctcttcctacagtccacaatatcctg

SEQ ID NO: 35485 - DNA, 33 bp, Homo sapiens
agtttcatctttacacactatatgcctatagac

SEQ ID NO: 35486 - DNA, 33 bp, Homo sapiens
ataccaagttgcttgacgtaaaattaataagac

SEQ ID NO: 35487 - DNA, 33 bp, Homo sapiens
ataaagttccaatcaaattagaaaattctttta

SEQ ID NO: 35488 - DNA, 33 bp, Homo sapiens
tgcattcacttaacaccctcatttgaaaatttt

SEQ ID NO: 35489 - DNA, 33 bp, Homo sapiens
tttttagcctattaacacttaaatcacctactg

SEQ ID NO: 35490 - DNA, 33 bp, Homo sapiens
tatattttctccaggaacacagcattctagtta

SEQ ID NO: 35491 - DNA, 33 bp, Homo sapiens
taatatccttcatgacccaagagtgatgccact

SEQ ID NO: 35492 - DNA, 33 bp, Homo sapiens
atctgcacataagacccatgactttaacacatg

SEQ ID NO: 35493 - DNA, 33 bp, Homo sapiens
gaaagaaactctaacactctaggctttgtattc

SEQ ID NO: 35494 - DNA, 33 bp, Homo sapiens
gccagctgggcttggaaacctcgctagcagctt

SEQ ID NO: 35495 - DNA, 51 bp, Homo sapiens
cctcttccctcctcctcccttggcaaagttccactgttgttcttcctcccg

SEQ ID NO: 35496 - DNA, 33 bp, Homo sapiens
tagaaataccttaacaatcatcattctaaacaa

SEQ ID NO: 35497 - DNA, 33 bp, Homo sapiens
ttgaatttcatggaatgagctggatagagatca

SEQ ID NO: 35498 - DNA, 33 bp, Homo sapiens
caatcagttaggtcaacacgaatctaacactat

SEQ ID NO: 35499 - DNA, 33 bp, Homo sapiens
tacattcagtctctcacaaaagtcacctggagt

SEQ ID NO: 35500 - DNA, 33 bp, Homo sapiens
atttaacctctcttaccctccttcaacaagcta

SEQ ID NO: 35501 - DNA, 33 bp, Homo sapiens
ttatatgaatgtgaacagtccacaaaatatgtt

SEQ ID NO: 35502 - DNA, 33 bp, Homo sapiens
ctgtgatgctcacacaatggaactgcctaagga

SEQ ID NO: 35503 - DNA, 33 bp, Homo sapiens
gtggaggagtcatatgcatcattcctcatgtga

SEQ ID NO: 35504 - DNA, 51 bp, Homo sapiens
agtcaatgcttgagcaggattgcaaggagagatacatattagggaaaacta

SEQ ID NO: 35505 - DNA, 33 bp, Homo sapiens
tcttcattcttattccccctctttgtaactaca

SEQ ID NO: 35506 - DNA, 33 bp, Homo sapiens
taactagggtccaggaacaaattgaaatgacaa

SEQ ID NO: 35507 - DNA, 33 bp, Homo sapiens
gtggtatctctaggcacctggaaaaaagctccc

SEQ ID NO: 35508 - DNA, 33 bp, Homo sapiens
gtggagccacttggcagtccttaagtacatcct

SEQ ID NO: 35509 - DNA, 33 bp, Homo sapiens
ggactgacaaaaattacagctttcccttgaaca

SEQ ID NO: 35510 - DNA, 33 bp, Homo sapiens
aacttttacagacaacacaagaacacgctaaaa

SEQ ID NO: 35511 - DNA, 33 bp, Homo sapiens
ttatgatttccaaatgaatgctattatctggaa

SEQ ID NO: 35512 - DNA, 33 bp, Homo sapiens
cctatccttcgaatcccagatcaaagcccactt

SEQ ID NO: 35513 - DNA, 33 bp, Homo sapiens
cttgaagacaatgatacagctgctgatttattc

SEQ ID NO: 35514 - DNA, 33 bp, Homo sapiens
aggtgagccaaagacaaggaagcaatatctaca

SEQ ID NO: 35515 - DNA, 33 bp, Homo sapiens
tactagcacatttggcgcatacctcttcattct

SEQ ID NO: 35516 - DNA, 33 bp, Homo sapiens
caacaaaaaagtggaagtagcttaaagaagtat

SEQ ID NO: 35517 - DNA, 33 bp, Homo sapiens
ttaatatttttgattcaccaattagaccataaa

SEQ ID NO: 35518 - DNA, 33 bp, Homo sapiens
atatgccatgctcatccatgtaactgaatcttg

SEQ ID NO: 35519 - DNA, 33 bp, Homo sapiens
ctaacacatttaggatcaagcttacaaatgact

SEQ ID NO: 35520 - DNA, 33 bp, Homo sapiens
agttaatagacatcagaattggttccagattag

SEQ ID NO: 35521 - DNA, 33 bp, Homo sapiens
cttttgcttgctactccaccattttttgtatct

SEQ ID NO: 35522 - DNA, 33 bp, Homo sapiens
cacctgtgtgtatccaacagcaagaagactgaa

SEQ ID NO: 35523 - DNA, 51 bp, Homo sapiens
catgactcttcccacagtgcactaacaagtagtaaaagctgaaaggaagac

SEQ ID NO: 35524 - DNA, 33 bp, Homo sapiens
ttctggacctgagtgccagaaggaggcccactg

SEQ ID NO: 35525 - DNA, 33 bp, Homo sapiens
caagagtaaaagaaaacgtactaaatggatgta

SEQ ID NO: 35526 - DNA, 33 bp, Homo sapiens
tatttttctgactgcaaaaatccaactaattta

SEQ ID NO: 35527 - DNA, 33 bp, Homo sapiens
tgcctccctcaaatcaaaggccaatctgtcatt

SEQ ID NO: 35528 - DNA, 51 bp, Homo sapiens
agtttagcttcttcatcaaccaccacggaagaaaatcctccaccaaaagag

SEQ ID NO: 35529 - DNA, 33 bp, Homo sapiens
ttctttattacaagcactacatacaggaatagg

SEQ ID NO: 35530 - DNA, 33 bp, Homo sapiens
ccaccactcttcagacaaggaaaggaagaaaac

SEQ ID NO: 35531 - DNA, 33 bp, Homo sapiens
ctgatgagttagccttcaagaagaggatgtaca

SEQ ID NO: 35532 - DNA, 33 bp, Homo sapiens
tgtaaaatggacttaacgacaaaatacatgaat

SEQ ID NO: 35533 - DNA, 33 bp, Homo sapiens
cagtttttaggacatacagtgtcgtctatttat

SEQ ID NO: 35534 - DNA, 33 bp, Homo sapiens
tcacttccaggtcaagaatgttctaaaacaaac

SEQ ID NO: 35535 - DNA, 33 bp, Homo sapiens
cctggactacacagaacaaagaacaaagaattt

SEQ ID NO: 35536 - DNA, 33 bp, Homo sapiens
acaagacatagtaaaaactccgagtattgtaac

SEQ ID NO: 35537 - DNA, 33 bp, Homo sapiens
tatacctggtccattcaaagaattcatccacaa

SEQ ID NO: 35538 - DNA, 33 bp, Homo sapiens
ctgttcagtgacttccagagagtttttccacac

SEQ ID NO: 35539 - DNA, 33 bp, Homo sapiens
ttgcttaagaactaaacaaaatcagagttcagt

SEQ ID NO: 35540 - DNA, 33 bp, Homo sapiens
atagaacattttattcaaagaaaagtcattgca

SEQ ID NO: 35541 - DNA, 33 bp, Homo sapiens
tgcttctcgaatgaataaaagaatgactcaaat

SEQ ID NO: 35542 - DNA, 33 bp, Homo sapiens
ttctagactttaaattcaagggtgagagataaa

SEQ ID NO: 35543 - DNA, 33 bp, Homo sapiens
ggattttgaatccagacggggagaaataaagat

SEQ ID NO: 35544 - DNA, 33 bp, Homo sapiens
taaagccttgctaaaacgtgctaagatgctgtg

SEQ ID NO: 35545 - DNA, 51 bp, Homo sapiens
cttttgttctcatctataatctggaggagattgtaacaattttttttctgt

SEQ ID NO: 35546 - DNA, 33 bp, Homo sapiens
ccagtgtcaggaacacagagggaataaagtctg

SEQ ID NO: 35547 - DNA, 33 bp, Homo sapiens
agaacactctgaggacaaacactgtcttttcac

SEQ ID NO: 35548 - DNA, 33 bp, Homo sapiens
atgcgagagagcaaaagaagagatcgcagatta

SEQ ID NO: 35549 - DNA, 33 bp, Homo sapiens
aaaaaatgcactctggaaaaagcaatgtgtcag

SEQ ID NO: 35550 - DNA, 33 bp, Homo sapiens
cttaatttagacatgaagatgagcagtaaattc

SEQ ID NO: 35551 - DNA, 33 bp, Homo sapiens
tgtgattataaccagcaagtatatttggcacag

SEQ ID NO: 35552 - DNA, 51 bp, Homo sapiens
gttgttgttttctgggggcatggaaataattgtgatttgaagtttctgttt

SEQ ID NO: 35553 - DNA, 33 bp, Homo sapiens
ataggaagttctcaataaattgaatcgtagcag

SEQ ID NO: 35554 - DNA, 33 bp, Homo sapiens
gcgctgttagcaaaaacgttactactatcagtc

SEQ ID NO: 35555 - DNA, 33 bp, Homo sapiens
gcagctacacttgttcaatctttgtcttcaagc

SEQ ID NO: 35556 - DNA, 33 bp, Homo sapiens
taggcctttggtgtaaacttaactgtgtctgcc

SEQ ID NO: 35557 - DNA, 33 bp, Homo sapiens
ttaggctgtaaagaaactgaaactctcaagccc

SEQ ID NO: 35558 - DNA, 33 bp, Homo sapiens
cacaggaagttccacacagaacaacaagtcaac

SEQ ID NO: 35559 - DNA, 33 bp, Homo sapiens
tctaaaattcattcgtcacatcattcactcaaa

SEQ ID NO: 35560 - DNA, 33 bp, Homo sapiens
ataatttgcttgtgtcgcactgtaaaatatctt

SEQ ID NO: 35561 - DNA, 33 bp, Homo sapiens
gatgtatgccagcttacgatgtatctctgaaat

SEQ ID NO: 35562 - DNA, 33 bp, Homo sapiens
gctgacatagtgaccaactgaagtccttagagg

SEQ ID NO: 35563 - DNA, 33 bp, Homo sapiens
ctatccttggaaaaaactggcagctgaacaaca

SEQ ID NO: 35564 - DNA, 33 bp, Homo sapiens
aatggcatatgctctaccaacgaactgaaagac

SEQ ID NO: 35565 - DNA, 33 bp, Homo sapiens
gagaagcgtcaaggtcacctttctcaactgagc

SEQ ID NO: 35566 - DNA, 33 bp, Homo sapiens
aaaggaccattcaaagaaccatgtcaaatctga

SEQ ID NO: 35567 - DNA, 51 bp, Homo sapiens
tgctattctagaatgtttattttctcaaaacaggaattttttctcattcag

SEQ ID NO: 35568 - DNA, 33 bp, Homo sapiens
gtgatactgcacccaaatacttacataaagtgg

SEQ ID NO: 35569 - DNA, 33 bp, Homo sapiens
gggcaggggagtcagcagagagatgaacagtct

SEQ ID NO: 35570 - DNA, 33 bp, Homo sapiens
tcttgtcctggtcgtgaaaaaatgtaatttggc

SEQ ID NO: 35571 - DNA, 33 bp, Homo sapiens
cccatcttgctagtgaaggtatgaagacaagga

SEQ ID NO: 35572 - DNA, 33 bp, Homo sapiens
ccagactactcagggcaatacttggaataacga

SEQ ID NO: 35573 - DNA, 33 bp, Homo sapiens
cagagttacaggaaagcctatggagttatttac

SEQ ID NO: 35574 - DNA, 33 bp, Homo sapiens
ccagcaactgatcaataaggtggcagtaattac

SEQ ID NO: 35575 - DNA, 33 bp, Homo sapiens
tctatatttccatttcacataacttagtatgaa

SEQ ID NO: 35576 - DNA, 33 bp, Homo sapiens
ggttgagagtgtctaccgattattgagaaccac

SEQ ID NO: 35577 - DNA, 51 bp, Homo sapiens
aaagtgtttcctttgttctaataaacagaagtctctcctcactgcacttcc

SEQ ID NO: 35578 - DNA, 33 bp, Homo sapiens
atctacatactatccagcctatcattaattaat

SEQ ID NO: 35579 - DNA, 51 bp, Homo sapiens
ctggcacaggaaaattcttcaaagacgacgtgttgaattgtagctttatac

SEQ ID NO: 35580 - DNA, 33 bp, Homo sapiens
ctgttgagaccttcaacgtactggaaattctga

SEQ ID NO: 35581 - DNA, 33 bp, Homo sapiens
gagtgccaagatgcaacgtacagccaaccctca

SEQ ID NO: 35582 - DNA, 33 bp, Homo sapiens
tttataaggagaatgaagaaacactaatgaaag

SEQ ID NO: 35583 - DNA, 33 bp, Homo sapiens
ggacacagcctcaagaggtcccgagatcatatg

SEQ ID NO: 35584 - DNA, 33 bp, Homo sapiens
tagccatgagtgacaacgatgggaaatgcttct

SEQ ID NO: 35585 - DNA, 33 bp, Homo sapiens
ggtcacggagacaacccacgaaaatgatttgtt

SEQ ID NO: 35586 - DNA, 33 bp, Homo sapiens
gagactaggtcaaagacgaacttattatttctt

SEQ ID NO: 35587 - DNA, 51 bp, Homo sapiens
tgtaaacaaattggaaaataaaaaggaccacttgagtgaaaacagatttta

SEQ ID NO: 35588 - DNA, 33 bp, Homo sapiens
gaaggattccctctctaaaagactgcaatatgg

SEQ ID NO: 35589 - DNA, 33 bp, Homo sapiens
aagttccatggttattaaagggaaatggacata

SEQ ID NO: 35590 - DNA, 33 bp, Homo sapiens
agtgagagtccaatctcagagcattacttcttt

SEQ ID NO: 35591 - DNA, 33 bp, Homo sapiens
tagagcgtgtcacatgaatgtaaataccaaagg

SEQ ID NO: 35592 - DNA, 33 bp, Homo sapiens
ttcaacaatgttggaacggaatgaagggtagag

SEQ ID NO: 35593 - DNA, 33 bp, Homo sapiens
tcccaggacatagaccactgtagtattgtcacg

SEQ ID NO: 35594 - DNA, 33 bp, Homo sapiens
gacctagtatataatcaatcaggccaagccact

SEQ ID NO: 35595 - DNA, 33 bp, Homo sapiens
ctctaagaccctgcaccaacaatctgttttccc

SEQ ID NO: 35596 - DNA, 33 bp, Homo sapiens
ttataattcatctcacactccttgatcatcaaa

SEQ ID NO: 35597 - DNA, 33 bp, Homo sapiens
tttctggtttggccaactgattggatggatgat

SEQ ID NO: 35598 - DNA, 33 bp, Homo sapiens
gggataagcacacttcaaaagatgttttctagc

SEQ ID NO: 35599 - DNA, 33 bp, Homo sapiens
attccttccatgtccacagcagatgtcaaaacc

SEQ ID NO: 35600 - DNA, 33 bp, Homo sapiens
gtgattttgtgaaaagcctgttggaaaccccga

SEQ ID NO: 35601 - DNA, 33 bp, Homo sapiens
ttgtataacctcccaacgtgcctctcacaatgc

SEQ ID NO: 35602 - DNA, 51 bp, Homo sapiens
gcatgaatctatcccaatagtaacacgtacagagaggatgcaagatgctta

SEQ ID NO: 35603 - DNA, 33 bp, Homo sapiens
gaactgctttttagcacaaaacttatccataga

SEQ ID NO: 35604 - DNA, 33 bp, Homo sapiens
ttgcaaatttgcgttacgtcctggaacttcaat

SEQ ID NO: 35605 - DNA, 33 bp, Homo sapiens
aagtattttgaggtaaagggccataatgtatgc

SEQ ID NO: 35606 - DNA, 51 bp, Homo sapiens
cagtccaaagaggccgttctgcttccaaatgcctactgaaagtgaaatgca

SEQ ID NO: 35607 - DNA, 51 bp, Homo sapiens
gacatatttattcaatgcaagtgtccattctggtgaccagtcacaatttca

SEQ ID NO: 35608 - DNA, 33 bp, Homo sapiens
ggttaataaatctgaacgacagctatcgtactc

SEQ ID NO: 35609 - DNA, 33 bp, Homo sapiens
aattgtcagggacataggtagtggctataggtt

SEQ ID NO: 35610 - DNA, 33 bp, Homo sapiens
atacatatttggaaccaaacgggtacccattga

SEQ ID NO: 35611 - DNA, 33 bp, Homo sapiens
ggcatcgggaacgttacaaatagaaagtcccaa

SEQ ID NO: 35612 - DNA, 33 bp, Homo sapiens
catgactcagtttatcacacataccatgctatt

SEQ ID NO: 35613 - DNA, 33 bp, Homo sapiens
tcccataaaagcacaaactcatcaattgaatac

SEQ ID NO: 35614 - DNA, 33 bp, Homo sapiens
tttagtgagtcaggtaacaactgcctgatctgt

SEQ ID NO: 35615 - DNA, 51 bp, Homo sapiens
aaatgatagagaaaagtaatatgaacactaaatgtagaaactgccttaaat

SEQ ID NO: 35616 - DNA, 33 bp, Homo sapiens
agaaaagcaggagaaactcacagaatcacttac

SEQ ID NO: 35617 - DNA, 33 bp, Homo sapiens
gcttatttcttggctccattcgagatcttactc

SEQ ID NO: 35618 - DNA, 33 bp, Homo sapiens
agtatttcaaaatctgccaaaccgataggaata

SEQ ID NO: 35619 - DNA, 33 bp, Homo sapiens
gcttgtcttcttgcagcaggaaaggagatgaaa

SEQ ID NO: 35620 - DNA, 51 bp, Homo sapiens
ctatttgctcattggcttaaagagaagtttattaaatacactctgaaattt

SEQ ID NO: 35621 - DNA, 33 bp, Homo sapiens
gagctgatgaccagccaaggctaacatattaca

SEQ ID NO: 35622 - DNA, 33 bp, Homo sapiens
gcatttaaatactaacagtgaatggccaattct

SEQ ID NO: 35623 - DNA, 33 bp, Homo sapiens
tcatatgaaccaagaaagtgcccaaataaatag

SEQ ID NO: 35624 - DNA, 33 bp, Homo sapiens
aactgtgcgggtgctacattccttacctctata

SEQ ID NO: 35625 - DNA, 51 bp, Homo sapiens
acaaaaagtgtactgtatgctctgtaaattcaaagttgctttttctgtaat

SEQ ID NO: 35626 - DNA, 51 bp, Homo sapiens
tgatacttctgaaaacatgactttacgaaataaacaagaacaaaatctaag

SEQ ID NO: 35627 - DNA, 33 bp, Homo sapiens
accactgagggaagataagactcccatggggga

SEQ ID NO: 35628 - DNA, 33 bp, Homo sapiens
ttctcagctgtattgaagaataattgacaaatt

SEQ ID NO: 35629 - DNA, 33 bp, Homo sapiens
gcatgcaaagttataaatgtaagaattacagca

SEQ ID NO: 35630 - DNA, 33 bp, Homo sapiens
gttgtcactgacaaacagtatcaattagctaat

SEQ ID NO: 35631 - DNA, 33 bp, Homo sapiens
cattgactgcattccaaaacctagtaaatcatg

SEQ ID NO: 35632 - DNA, 33 bp, Homo sapiens
ttctacattactgctaacatggccgtcattaat

SEQ ID NO: 35633 - DNA, 33 bp, Homo sapiens
cagacacataatttggaaaaaagctctgattct

SEQ ID NO: 35634 - DNA, 33 bp, Homo sapiens
aatttctgatgttttaagagagaattatctttt

SEQ ID NO: 35635 - DNA, 33 bp, Homo sapiens
ctttgtctcagtttcaccattttaaagtgaggg

SEQ ID NO: 35636 - DNA, 33 bp, Homo sapiens
cacatttaacggaatacgttttatgaccacaat

SEQ ID NO: 35637 - DNA, 33 bp, Homo sapiens
tgttaaactctaaataagccagattgcataaca

SEQ ID NO: 35638 - DNA, 33 bp, Homo sapiens
atcaaaaggaatggggaactctatgcccagaca

SEQ ID NO: 35639 - DNA, 33 bp, Homo sapiens
agagaccatgccatcaagtacaccagcagactc

SEQ ID NO: 35640 - DNA, 33 bp, Homo sapiens
actctcttagctctagccactttttaggaagtt

SEQ ID NO: 35641 - DNA, 33 bp, Homo sapiens
tctgtcttatgcagtcaagagaaggactgaaat

SEQ ID NO: 35642 - DNA, 33 bp, Homo sapiens
gatgcatctagaataacacttcccatcgccttc

SEQ ID NO: 35643 - DNA, 33 bp, Homo sapiens
ccactcacttatgttacagcctatggtaagtta

SEQ ID NO: 35644 - DNA, 33 bp, Homo sapiens
aaaaattagcacaaaccgtcagtgattttagac

SEQ ID NO: 35645 - DNA, 33 bp, Homo sapiens
agaaccccgagtatgacctgtcaatagggggct

SEQ ID NO: 35646 - DNA, 33 bp, Homo sapiens
atgattgtatgtgtgacgtatttcactaatatt

SEQ ID NO: 35647 - DNA, 33 bp, Homo sapiens
agggcccctggtttaacagaggtcatttacaat

SEQ ID NO: 35648 - DNA, 33 bp, Homo sapiens
tgagcgatcgctcacaaaggtttgacatatacc

SEQ ID NO: 35649 - DNA, 33 bp, Homo sapiens
ctaaggataacataggaaaggttgtctaagcaa

SEQ ID NO: 35650 - DNA, 33 bp, Homo sapiens
ctactgaggaattatcaagagagcacaaatttt

SEQ ID NO: 35651 - DNA, 33 bp, Homo sapiens
cagtccaaatgacctaaggtggtaatgatacaa

SEQ ID NO: 35652 - DNA, 33 bp, Homo sapiens
taagctttggtaattacgtctatctacacaaaa

SEQ ID NO: 35653 - DNA, 33 bp, Homo sapiens
ccttgtcactctaagccgatctattcttgtacc

SEQ ID NO: 35654 - DNA, 33 bp, Homo sapiens
aagcatgagctccagaacaaaattatttagttc

SEQ ID NO: 35655 - DNA, 33 bp, Homo sapiens
atggtttttatcggaaatgcaaagggcatggca

SEQ ID NO: 35656 - DNA, 33 bp, Homo sapiens
cacaacacctgaagaacagtgtgccttgaagtc

SEQ ID NO: 35657 - DNA, 33 bp, Homo sapiens
ataatagtgaatgccaaataagtgcaatggtcc

SEQ ID NO: 35658 - DNA, 51 bp, Homo sapiens
gaagaacagggagaaaattctgggcaatgagaggagtcaagtttcaaaaca

SEQ ID NO: 35659 - DNA, 33 bp, Homo sapiens
tggtggatgaattctaaatgagctactgtttca

SEQ ID NO: 35660 - DNA, 33 bp, Homo sapiens
tccattgccccaacagccaaattgtgaccttct

SEQ ID NO: 35661 - DNA, 33 bp, Homo sapiens
ggaacgtgcactttgccgaacatggatcacagt

SEQ ID NO: 35662 - DNA, 33 bp, Homo sapiens
gcccttgattaccatacgcttatcaggccatag

SEQ ID NO: 35663 - DNA, 33 bp, Homo sapiens
agaatcaagttcattacgttatggtaccagaat

SEQ ID NO: 35664 - DNA, 33 bp, Homo sapiens
ggaaaaatactgtccacgaagtgagcaccatgt

SEQ ID NO: 35665 - DNA, 33 bp, Homo sapiens
ggagggatggattcagaagacatgggttccaag

SEQ ID NO: 35666 - DNA, 33 bp, Homo sapiens
tgagaaatgatatcccaaagtctaatccaatca

SEQ ID NO: 35667 - DNA, 33 bp, Homo sapiens
tgtctcctttagtgtgcatggcttaaggtatct

SEQ ID NO: 35668 - DNA, 33 bp, Homo sapiens
gactcttgttgagcaaatagaataaagtatgat

SEQ ID NO: 35669 - DNA, 33 bp, Homo sapiens
gagaaaaacagattcaaaactctaaatagaaaa

SEQ ID NO: 35670 - DNA, 33 bp, Homo sapiens
ttgctcaatggtcaaccgtatttgctaagtgaa

SEQ ID NO: 35671 - DNA, 33 bp, Homo sapiens
aatggaagtcaaagtcaagatctgtaaatggca

SEQ ID NO: 35672 - DNA, 33 bp, Homo sapiens
acatctctatagccaccggttcaagttttaatt

SEQ ID NO: 35673 - DNA, 33 bp, Homo sapiens
atccatgcactgcagaatagatgttggatagca

SEQ ID NO: 35674 - DNA, 33 bp, Homo sapiens
ataacattcaaggaaacggggaagtatgaaaaa

SEQ ID NO: 35675 - DNA, 33 bp, Homo sapiens
caattacatcggcaacaaaaactcattttacaa

SEQ ID NO: 35676 - DNA, 33 bp, Homo sapiens
aatgaagccagaattccaaaaaacataagctaa

SEQ ID NO: 35677 - DNA, 33 bp, Homo sapiens
gcacatggccacagaggagacaaatgttttccg

SEQ ID NO: 35678 - DNA, 33 bp, Homo sapiens
tacatctttacctaaaatgattaacaagtagcc

SEQ ID NO: 35679 - DNA, 33 bp, Homo sapiens
atttcatttagtggaaaatatgtatcaagttgt

SEQ ID NO: 35680 - DNA, 33 bp, Homo sapiens
aatgttgaaagttggccagatgaagaaatgaag

SEQ ID NO: 35681 - DNA, 33 bp, Homo sapiens
ccatcattaagctagacaaatcccagaggtcaa

SEQ ID NO: 35682 - DNA, 33 bp, Homo sapiens
gagtatgggatggaccactagtactaaagccag

SEQ ID NO: 35683 - DNA, 33 bp, Homo sapiens
ctcagcctttactagcaccagtgtcttgtacaa

SEQ ID NO: 35684 - DNA, 33 bp, Homo sapiens
gtgactggataggagaaagccacaaaacgacaa

SEQ ID NO: 35685 - DNA, 33 bp, Homo sapiens
gctcatacaaatgtgaagccattaagaaaacat

SEQ ID NO: 35686 - DNA, 33 bp, Homo sapiens
cccttgatgatctttcccccattctgtaccccc

SEQ ID NO: 35687 - DNA, 51 bp, Homo sapiens
aagatctattttagtcttcaacttacgggtctctttgggcctcagtgactt

SEQ ID NO: 35688 - DNA, 33 bp, Homo sapiens
tttcaacaaatatgcactgcactgtgagagatc

SEQ ID NO: 35689 - DNA, 33 bp, Homo sapiens
ttgcaactgttatgaaatgcgctacaatggaag

SEQ ID NO: 35690 - DNA, 33 bp, Homo sapiens
aatataggatcgtataatagtttttttctcttc

SEQ ID NO: 35691 - DNA, 33 bp, Homo sapiens
taaagagatttataagacagatgcaccgtggag

SEQ ID NO: 35692 - DNA, 33 bp, Homo sapiens
tgctgatgtgcaagtacataatcacagaaacca

SEQ ID NO: 35693 - DNA, 51 bp, Homo sapiens
gctgtcaccgtgaatcaggctagacccaacttgaagaaacatcctgggatc

SEQ ID NO: 35694 - DNA, 51 bp, Homo sapiens
gcctatcctctgccatgctgtgaaaagataacctgctttgggtgctctgat

SEQ ID NO: 35695 - DNA, 51 bp, Homo sapiens
gtgtgttcctgttcaaaaaacttcaagttaacatccattgtcctagagtaa

SEQ ID NO: 35696 - DNA, 33 bp, Homo sapiens
gtcatctataaagccaaacttcattcattggaa

SEQ ID NO: 35697 - DNA, 33 bp, Homo sapiens
atttggtgcactgtcactagcttaaagacggag

SEQ ID NO: 35698 - DNA, 33 bp, Homo sapiens
ccatatctttctatcaggaattactcttgaaaa

SEQ ID NO: 35699 - DNA, 33 bp, Homo sapiens
gttcaactgcctggtaaaattaaggaaaaaaag

SEQ ID NO: 35700 - DNA, 33 bp, Homo sapiens
gggaaaagtgtgacgacggtccaacaaagagtt

SEQ ID NO: 35701 - DNA, 33 bp, Homo sapiens
gatatgtggagagggagattgcaaggctagaga

SEQ ID NO: 35702 - DNA, 33 bp, Homo sapiens
aaggattcagaaaacacgggtgagccagataat

SEQ ID NO: 35703 - DNA, 33 bp, Homo sapiens
agtcttttccttcacaaataactcagagataaa

SEQ ID NO: 35704 - DNA, 33 bp, Homo sapiens
agtggaagcagtacgactccatggggatgcttt

SEQ ID NO: 35705 - DNA, 33 bp, Homo sapiens
caaatgctctgttactgaggtacttagcctttc

SEQ ID NO: 35706 - DNA, 33 bp, Homo sapiens
gaagggcagaaaacaacgaacaagaagtgggca

SEQ ID NO: 35707 - DNA, 33 bp, Homo sapiens
tgctctgctgggtccactaatcaatacatggaa

SEQ ID NO: 35708 - DNA, 33 bp, Homo sapiens
taactctactcttagccaaaaaagaagtgtata

SEQ ID NO: 35709 - DNA, 33 bp, Homo sapiens
tcattaggtcataacactgggggaggtttactg

SEQ ID NO: 35710 - DNA, 33 bp, Homo sapiens
taaggcctgttttccccacatgacagatgaaga

SEQ ID NO: 35711 - DNA, 33 bp, Homo sapiens
tgttgggttgttttcacggctagcaagatgaaa

SEQ ID NO: 35712 - DNA, 33 bp, Homo sapiens
acacctgtacactttacggaaggacacaggcct

SEQ ID NO: 35713 - DNA, 33 bp, Homo sapiens
taactggaaagccacacagagttattttttgca

SEQ ID NO: 35714 - DNA, 33 bp, Homo sapiens
tccctgctgtttccagacctttgttgcacccac

SEQ ID NO: 35715 - DNA, 33 bp, Homo sapiens
aatagctccttaaactaaactgtgcagctaact

SEQ ID NO: 35716 - DNA, 33 bp, Homo sapiens
gtaagagaggacattcaagagaaaaggtagagt

SEQ ID NO: 35717 - DNA, 33 bp, Homo sapiens
ctcaggcttctaataacggactccagattttta

SEQ ID NO: 35718 - DNA, 33 bp, Homo sapiens
gaccctaacactctccaagtcaaatccctttat

SEQ ID NO: 35719 - DNA, 33 bp, Homo sapiens
aaactctccgatttagaacaacagcaacaaata

SEQ ID NO: 35720 - DNA, 33 bp, Homo sapiens
ctctcgatgcagaaaccgatttttccatttttg

SEQ ID NO: 35721 - DNA, 33 bp, Homo sapiens
aagtcaaggttctaaacgtctaaaagtcactga

SEQ ID NO: 35722 - DNA, 33 bp, Homo sapiens
gaatgcccttgaagtacgtgggcaggctctatg

SEQ ID NO: 35723 - DNA, 33 bp, Homo sapiens
aggtaggtatttgagaaccacatatgaatatta

SEQ ID NO: 35724 - DNA, 33 bp, Homo sapiens
actctggtccatttagaattggcttatgctctt

SEQ ID NO: 35725 - DNA, 33 bp, Homo sapiens
tgtgtggtttctttagcagagtctgggtagttg

SEQ ID NO: 35726 - DNA, 33 bp, Homo sapiens
caccttattccacctgaaagtatgttatgtttg

SEQ ID NO: 35727 - DNA, 33 bp, Homo sapiens
agcttaaccctttggtaaatcagcgttattcca

SEQ ID NO: 35728 - DNA, 33 bp, Homo sapiens
ccaatggctaccaacaactagactaccaatagc

SEQ ID NO: 35729 - DNA, 33 bp, Homo sapiens
tgtctaacctctttcaagctatcacacaagtaa

SEQ ID NO: 35730 - DNA, 33 bp, Homo sapiens
atctcctttgctgtaacgcagcgtggtgtcata

SEQ ID NO: 35731 - DNA, 33 bp, Homo sapiens
tccagcaacacttaaccgcttctgggtgacagg

SEQ ID NO: 35732 - DNA, 33 bp, Homo sapiens
gacaagttctttaacccctcctggtctctgtta

SEQ ID NO: 35733 - DNA, 33 bp, Homo sapiens
cacaacagtctggtgagataggaattattatta

SEQ ID NO: 35734 - DNA, 33 bp, Homo sapiens
aggacaaagactgtagcatttcactaatatgag

SEQ ID NO: 35735 - DNA, 33 bp, Homo sapiens
cagaaactacaggaacaaatttctgtctgtaag

SEQ ID NO: 35736 - DNA, 33 bp, Homo sapiens
tcaaaagtgattctcaataagtacagcacccta

SEQ ID NO: 35737 - DNA, 33 bp, Homo sapiens
ttctagacacctgatacggaaactatgttactt

SEQ ID NO: 35738 - DNA, 33 bp, Homo sapiens
gtagaagtgatgtgagcagaggctttaaatgtg

SEQ ID NO: 35739 - DNA, 33 bp, Homo sapiens
tactttttagaatcctcaaccttctcagtatag

SEQ ID NO: 35740 - DNA, 33 bp, Homo sapiens
tccacttagtgcagaaccctagaactttcctgg

SEQ ID NO: 35741 - DNA, 33 bp, Homo sapiens
gtaatgactgcaggtacgaggggcctaaaggac

SEQ ID NO: 35742 - DNA, 33 bp, Homo sapiens
acaaacaaaaatcctaccttgattgccccactc

SEQ ID NO: 35743 - DNA, 33 bp, Homo sapiens
tgagcaaccactgcctaaaccattggactttgg

SEQ ID NO: 35744 - DNA, 51 bp, Homo sapiens
caaccataatgacataaacagtgaaaattgttttaacccataattgtgata

SEQ ID NO: 35745 - DNA, 33 bp, Homo sapiens
agtgccttagttcagaacagagaagagtagcga

SEQ ID NO: 35746 - DNA, 33 bp, Homo sapiens
gtatttcaacagccacaaggatcctgtctacgt

SEQ ID NO: 35747 - DNA, 33 bp, Homo sapiens
ctggctccttcttagcggaaatatccccttttt

SEQ ID NO: 35748 - DNA, 33 bp, Homo sapiens
aggtctgactctatcacagttaaagcgacttga

SEQ ID NO: 35749 - DNA, 33 bp, Homo sapiens
tgagctggacatgaaaaataggcagattgggac

SEQ ID NO: 35750 - DNA, 33 bp, Homo sapiens
tataactatagacatccatagcttactataata

SEQ ID NO: 35751 - DNA, 33 bp, Homo sapiens
aacaggtagaatcaaaatcctgtatgtatgttc

SEQ ID NO: 35752 - DNA, 33 bp, Homo sapiens
caatatgccagagtccaggaagtctccaggcag

SEQ ID NO: 35753 - DNA, 33 bp, Homo sapiens
cctgattttagtggcacctacatgaatgtgtac

SEQ ID NO: 35754 - DNA, 33 bp, Homo sapiens
gggtaagtgtgtaagaaagtttcagtaagagtt

SEQ ID NO: 35755 - DNA, 33 bp, Homo sapiens
catgtctctaaatgggaaagtctcatgagggga

SEQ ID NO: 35756 - DNA, 51 bp, Homo sapiens
agctctcattttattagttggtatacgcagtgcttaaaggccttatgcggc

SEQ ID NO: 35757 - DNA, 33 bp, Homo sapiens
tgacctcactttcctccctgattcatacaaatt

SEQ ID NO: 35758 - DNA, 33 bp, Homo sapiens
atcattattatgataccagtggttgtttcgaga

SEQ ID NO: 35759 - DNA, 33 bp, Homo sapiens
gacagcaacataacagccatttataacaaagtc

SEQ ID NO: 35760 - DNA, 33 bp, Homo sapiens
ccacttcctcatagcagatttttactgtgtcct

SEQ ID NO: 35761 - DNA, 33 bp, Homo sapiens
ggaaaaaaccttggaaatgtaaatgcctctaag

SEQ ID NO: 35762 - DNA, 51 bp, Homo sapiens
gagagagaatatgaatgagacacaacgtgaatgagagagatgtcaaccatt

SEQ ID NO: 35763 - DNA, 51 bp, Homo sapiens
gaaatctcacgccatttcttaaaggaatctgatggagagtagtcttaattt

SEQ ID NO: 35764 - DNA, 51 bp, Homo sapiens
gacagaaatagatgaattcagaagacatttttagagataggacttataata

SEQ ID NO: 35765 - DNA, 33 bp, Homo sapiens
aatccatataacagcaaaaatgaatacagtgct

SEQ ID NO: 35766 - DNA, 33 bp, Homo sapiens
gtgtgtgtaggcatgaagggagagacgaataga

SEQ ID NO: 35767 - DNA, 33 bp, Homo sapiens
ctggacatttaattcacgttgctcttaaatcca

SEQ ID NO: 35768 - DNA, 33 bp, Homo sapiens
tttacaaatatacttcaaagtgaaaaggttgca

SEQ ID NO: 35769 - DNA, 33 bp, Homo sapiens
aggaggacaggagtcacctctaatatgaaaggc

SEQ ID NO: 35770 - DNA, 33 bp, Homo sapiens
ggaaagaacgagcaaaagcaaaggcccagagga

SEQ ID NO: 35771 - DNA, 33 bp, Homo sapiens
atgtcctcagagtgccaacttattacagaatat

SEQ ID NO: 35772 - DNA, 33 bp, Homo sapiens
actatatgccagataccatactaggatttgcac

SEQ ID NO: 35773 - DNA, 33 bp, Homo sapiens
aaagtgttccagagaaatactgaaactatgggg

SEQ ID NO: 35774 - DNA, 33 bp, Homo sapiens
gaaataagccttcagagagcaataacactaaag

SEQ ID NO: 35775 - DNA, 33 bp, Homo sapiens
taatattgccaaaatacgagtcaatagccagtt

SEQ ID NO: 35776 - DNA, 51 bp, Homo sapiens
aatgtctaagaagatctttacaagacctgagccatagaatattacagtatt

SEQ ID NO: 35777 - DNA, 33 bp, Homo sapiens
actaaagctaggtaaacgtttggtgcagttcac

SEQ ID NO: 35778 - DNA, 33 bp, Homo sapiens
acagttgttgtgaagaaaactgtgtagaacctg

SEQ ID NO: 35779 - DNA, 33 bp, Homo sapiens
atagaaaagatgtgtccaggattgctgtatcaa

SEQ ID NO: 35780 - DNA, 33 bp, Homo sapiens
tccatggaactaagaaagctactctacagcaca

SEQ ID NO: 35781 - DNA, 33 bp, Homo sapiens
aggtggccactcccaacggacctggataacgaa

SEQ ID NO: 35782 - DNA, 33 bp, Homo sapiens
ctccacaggttttggaagaccatgtccacctct

SEQ ID NO: 35783 - DNA, 33 bp, Homo sapiens
gttgttgcagaggccaagatctgattttttttt

SEQ ID NO: 35784 - DNA, 33 bp, Homo sapiens
aatcagactttcttaccgcagcttgtctgttga

SEQ ID NO: 35785 - DNA, 51 bp, Homo sapiens
tgatggatgtatcactttggaatgacccttaatgtcacatcatagttggta

SEQ ID NO: 35786 - DNA, 33 bp, Homo sapiens
attttacattgtaggcaatctgttcacacatca

SEQ ID NO: 35787 - DNA, 33 bp, Homo sapiens
tctttcttgacatgaaaataatgccgtgtaaac

SEQ ID NO: 35788 - DNA, 33 bp, Homo sapiens
actgggcatcatatcaacctctcccaacctgga

SEQ ID NO: 35789 - DNA, 33 bp, Homo sapiens
aatattatcctctcaaacgctggaaattatgaa

SEQ ID NO: 35790 - DNA, 33 bp, Homo sapiens
ttttggggtgaggatacgacagtataggctgaa

SEQ ID NO: 35791 - DNA, 33 bp, Homo sapiens
tgacgacaacgaaaaaaggatgtccgcttatga

SEQ ID NO: 35792 - DNA, 33 bp, Homo sapiens
cagatatccctttacaaatcccaagtttctggc

SEQ ID NO: 35793 - DNA, 33 bp, Homo sapiens
aaagtatctttttgtaagtttgtgagttagaca

SEQ ID NO: 35794 - DNA, 33 bp, Homo sapiens
taaatatatttcaagagagcatttctcagtgtc

SEQ ID NO: 35795 - DNA, 51 bp, Homo sapiens
ctgagacaagaatagactgagatgacagaaaaattgaattatatacaatta

SEQ ID NO: 35796 - DNA, 51 bp, Homo sapiens
gcactcacacactgtaaaggagataagcacttaataaatattcacaaaata

SEQ ID NO: 35797 - DNA, 33 bp, Homo sapiens
ttgttcaaaacgtaaaaaagtcatttatgtgta

SEQ ID NO: 35798 - DNA, 33 bp, Homo sapiens
tgatctgttgtattaacctcctggaaattctac

SEQ ID NO: 35799 - DNA, 33 bp, Homo sapiens
tcatgtccaagaaacacggcaaaaatggggcat

SEQ ID NO: 35800 - DNA, 33 bp, Homo sapiens
gccttgcctgtcattcccttacccaaaacatgg

SEQ ID NO: 35801 - DNA, 33 bp, Homo sapiens
tcttagaatgtctgaaagtccatttccacaact

SEQ ID NO: 35802 - DNA, 33 bp, Homo sapiens
tgagcacaacaggacactaaggcagatccatgc

SEQ ID NO: 35803 - DNA, 33 bp, Homo sapiens
ctttcctgtaatgagacctgggattctgcacac

SEQ ID NO: 35804 - DNA, 33 bp, Homo sapiens
atatactaatggaacaaggacatgataaccata

SEQ ID NO: 35805 - DNA, 33 bp, Homo sapiens
gtaggaaggagaatacaaaatctaggtttcttc

SEQ ID NO: 35806 - DNA, 33 bp, Homo sapiens
ccattacgttgtggtcactttctgtatatagta

SEQ ID NO: 35807 - DNA, 51 bp, Homo sapiens
ctatgttaacgctgaggttttagatcactgccttaaaaaataataacatct

SEQ ID NO: 35808 - DNA, 33 bp, Homo sapiens
gcacttgactgtcactcagtagatgctaaatga

SEQ ID NO: 35809 - DNA, 51 bp, Homo sapiens
ggaaggagaaaaagggaagaatttagactcataggggtcttataagggatt

SEQ ID NO: 35810 - DNA, 33 bp, Homo sapiens
ccttgcatttgtaagacaggcaaggacataggg

SEQ ID NO: 35811 - DNA, 51 bp, Homo sapiens
tggtgatacctggttagttgaaagaagcaatggttcaatggcacctaaatg

SEQ ID NO: 35812 - DNA, 33 bp, Homo sapiens
aaggagtcacaaagtacaaaacaacaatccaaa

SEQ ID NO: 35813 - DNA, 33 bp, Homo sapiens
ataaaacatctacagcacctgtgttaatacaaa

SEQ ID NO: 35814 - DNA, 33 bp, Homo sapiens
ttgtcacaggtgtcagcagtagagaatataagt

SEQ ID NO: 35815 - DNA, 33 bp, Homo sapiens
ttttaaaattcgtactcagcgcaatacttacaa

SEQ ID NO: 35816 - DNA, 33 bp, Homo sapiens
ttataaaaatgctagactatacttgtacttgcc

SEQ ID NO: 35817 - DNA, 51 bp, Homo sapiens
cacctagtctaggatgattgttacacgcttctagcaacaagtgcacataaa

SEQ ID NO: 35818 - DNA, 33 bp, Homo sapiens
tgttcctgtccccaaaacttctgctagtccttc

SEQ ID NO: 35819 - DNA, 33 bp, Homo sapiens
tttgtggattttcaagaagtgcctacttttact

SEQ ID NO: 35820 - DNA, 33 bp, Homo sapiens
tgggcaacttaatccacgaatgttgtctgtatt

SEQ ID NO: 35821 - DNA, 33 bp, Homo sapiens
tgccagagaatggcagccacacctacctatgag

SEQ ID NO: 35822 - DNA, 33 bp, Homo sapiens
taaagaacttctagaaactgaaatgacaaaaaa

SEQ ID NO: 35823 - DNA, 33 bp, Homo sapiens
actcccacagcaagaccacacgaaaccagcatt

SEQ ID NO: 35824 - DNA, 51 bp, Homo sapiens
agagaaaaagtgaacattacttacactcaatacataggttggctctgcaca

SEQ ID NO: 35825 - DNA, 33 bp, Homo sapiens
ttttaccctcgaccccccattcttgttcaccat

SEQ ID NO: 35826 - DNA, 33 bp, Homo sapiens
acatcacttctgttgaaaattcactggacaaag

SEQ ID NO: 35827 - DNA, 33 bp, Homo sapiens
ttccaataaaaagaagccacaacattttcctaa

SEQ ID NO: 35828 - DNA, 51 bp, Homo sapiens
ctaggcagtgactggtatagtttgaactttgtcttttttatttcagacttt

SEQ ID NO: 35829 - DNA, 51 bp, Homo sapiens
agcaaaatgataacacatcaatgtaacctgaacaatagaagaaggtaattc

SEQ ID NO: 35830 - DNA, 33 bp, Homo sapiens
taaatctggtctggcaaagagtgcaatggaagt

SEQ ID NO: 35831 - DNA, 33 bp, Homo sapiens
ggaagatcataacaaacttcagcatcctatggg

SEQ ID NO: 35832 - DNA, 51 bp, Homo sapiens
cagatgtagacactcaatttatgacagaagggctgctgcagagtaatgggg

SEQ ID NO: 35833 - DNA, 33 bp, Homo sapiens
tctgtaggatcccaaaacattcactcactcagg

SEQ ID NO: 35834 - DNA, 33 bp, Homo sapiens
actgtgaataccttcaggttcttggattataag

SEQ ID NO: 35835 - DNA, 33 bp, Homo sapiens
aggtcctttgatatacaccagaacaatttttat

SEQ ID NO: 35836 - DNA, 33 bp, Homo sapiens
atagatgctgaagctacggctcagagggaaata

SEQ ID NO: 35837 - DNA, 51 bp, Homo sapiens
gtttctcaggtcttttcaatagctaatttttactcactttaagattttctt

SEQ ID NO: 35838 - DNA, 33 bp, Homo sapiens
aggtagtccagatttacggattttctcctaaat

SEQ ID NO: 35839 - DNA, 33 bp, Homo sapiens
aagtctagctaaaccaagataattcattgattt

SEQ ID NO: 35840 - DNA, 33 bp, Homo sapiens
cagcagccttaaggataaagctattgtaacaag

SEQ ID NO: 35841 - DNA, 33 bp, Homo sapiens
tgatgttaaccttgccagaatttgtaatcagga

SEQ ID NO: 35842 - DNA, 33 bp, Homo sapiens
aaagagcctctaggccaatcttatctggagctt

SEQ ID NO: 35843 - DNA, 33 bp, Homo sapiens
actgtccctaaattcaaactcacatacctaaaa

SEQ ID NO: 35844 - DNA, 33 bp, Homo sapiens
ttttaatacagtaacaatccaaatcctaataag

SEQ ID NO: 35845 - DNA, 33 bp, Homo sapiens
catttgcaaggatgaaatgagataaggagctag

SEQ ID NO: 35846 - DNA, 33 bp, Homo sapiens
tagctgtaagggatgaagagaaagtgagtatat

SEQ ID NO: 35847 - DNA, 33 bp, Homo sapiens
tgttatttcctaagacagattccttccagtgtc

SEQ ID NO: 35848 - DNA, 33 bp, Homo sapiens
tgtagtttaagatacacgtagaaagtcattgct

SEQ ID NO: 35849 - DNA, 33 bp, Homo sapiens
tacttctgtctggcacgcagtttgtgatctcca

SEQ ID NO: 35850 - DNA, 33 bp, Homo sapiens
cttagaaacttgaataccgtggaaatctaacaa

SEQ ID NO: 35851 - DNA, 33 bp, Homo sapiens
agagaaactggcactcaacaactatttcatttg

SEQ ID NO: 35852 - DNA, 33 bp, Homo sapiens
ttagtgactccaactccatgtaaatctcttcaa

SEQ ID NO: 35853 - DNA, 33 bp, Homo sapiens
tcatgtcacattgttacgttcagttggatgtca

SEQ ID NO: 35854 - DNA, 33 bp, Homo sapiens
tatattcctcacttctaaaacagctgactccta

SEQ ID NO: 35855 - DNA, 33 bp, Homo sapiens
tcgaatgagatacgacaaggaaatttctcacaa

SEQ ID NO: 35856 - DNA, 33 bp, Homo sapiens
atcttaagattgtttcgagctctatatgccctg

SEQ ID NO: 35857 - DNA, 51 bp, Homo sapiens
ttacctggatcatcagctttgtgagcacagggttcacctttgtcttactca

SEQ ID NO: 35858 - DNA, 33 bp, Homo sapiens
cccttctccttccacacactcacagtaatttgg

SEQ ID NO: 35859 - DNA, 33 bp, Homo sapiens
taagacaaaattctgtcaagcaaggaatcattg

SEQ ID NO: 35860 - DNA, 33 bp, Homo sapiens
cctctgcctcttgggaacaccaatttactgaga

SEQ ID NO: 35861 - DNA, 33 bp, Homo sapiens
gtgtgcagtcattagcactatccatctctagaa

SEQ ID NO: 35862 - DNA, 33 bp, Homo sapiens
taggaagaaaagcagacgtagccagaaagctag

SEQ ID NO: 35863 - DNA, 33 bp, Homo sapiens
agctgaatggagacagaaaatagcagcaaacat

SEQ ID NO: 35864 - DNA, 33 bp, Homo sapiens
atttgaagaaatccaacgtaggcattaggaacc

SEQ ID NO: 35865 - DNA, 33 bp, Homo sapiens
aatgccactaaagttaaaagatgaaggaggaga

SEQ ID NO: 35866 - DNA, 33 bp, Homo sapiens
gtctttttattttttccagatagtgtcttgctc

SEQ ID NO: 35867 - DNA, 33 bp, Homo sapiens
agatcttcagaaaataaccgtcatttagtagac

SEQ ID NO: 35868 - DNA, 33 bp, Homo sapiens
cgtttatatcttcaccagcaatatgcattttag

SEQ ID NO: 35869 - DNA, 33 bp, Homo sapiens
gcccagggcctaaaacagtcagcacaaagcctc

SEQ ID NO: 35870 - DNA, 33 bp, Homo sapiens
tcctctttgtcttctccatcccaagaatcttcc

SEQ ID NO: 35871 - DNA, 51 bp, Homo sapiens
tctaccaccactttggcatttgatgatctagtcactctgtaattgggagat

SEQ ID NO: 35872 - DNA, 33 bp, Homo sapiens
gggacatagaatcatacatggttgctgacttgg

SEQ ID NO: 35873 - DNA, 33 bp, Homo sapiens
atctctctaatcaataagcaactccactgacca

SEQ ID NO: 35874 - DNA, 51 bp, Homo sapiens
aaaagtaatctaaaggtgaaggtaacagtaatagcagcatacagtataaat

SEQ ID NO: 35875 - DNA, 33 bp, Homo sapiens
aacattcggtgttacaaatgatgacattcctgt

SEQ ID NO: 35876 - DNA, 33 bp, Homo sapiens
tgaggattgaactttacgcttggtggtcagtaa

SEQ ID NO: 35877 - DNA, 33 bp, Homo sapiens
attttgaaagaactatcacaaacaaagtttaag

SEQ ID NO: 35878 - DNA, 33 bp, Homo sapiens
agaactgtggtttatacggactatcaatctaga

SEQ ID NO: 35879 - DNA, 33 bp, Homo sapiens
attacattcacagcttaaaacgggctatggtgg

SEQ ID NO: 35880 - DNA, 33 bp, Homo sapiens
cggttttcatggttccaacccgacctcatataa

SEQ ID NO: 35881 - DNA, 33 bp, Homo sapiens
cttgtagctgtgtcccaaaccagcaagatttat

SEQ ID NO: 35882 - DNA, 51 bp, Homo sapiens
aaacagctgttgccttcttctccacaatggaatcaaaggatcttatcacct

SEQ ID NO: 35883 - DNA, 51 bp, Homo sapiens
tggcttccttgtccttgcatagggaagaacacaggcagacgtggtaggaga

SEQ ID NO: 35884 - DNA, 33 bp, Homo sapiens
aggatgggctgcgtcacctttgtgggggccaac

SEQ ID NO: 35885 - DNA, 33 bp, Homo sapiens
ccagtgattggtttaactggcttgtggcagggc

SEQ ID NO: 35886 - DNA, 33 bp, Homo sapiens
cctctcaaagatttcacgaggtcaacaggggag

SEQ ID NO: 35887 - DNA, 33 bp, Homo sapiens
gctacatagagttccaaaataactttcctctgc

SEQ ID NO: 35888 - DNA, 33 bp, Homo sapiens
atttttttgtgcaaaaataatacataacaaagg

SEQ ID NO: 35889 - DNA, 33 bp, Homo sapiens
ggagggagacctagtacagccattgataaatgt

SEQ ID NO: 35890 - DNA, 33 bp, Homo sapiens
ctctgtgtacactctacctgcaaagctcactgg

SEQ ID NO: 35891 - DNA, 33 bp, Homo sapiens
ttcggaacatcctgcaatatagaatctcatccc

SEQ ID NO: 35892 - DNA, 33 bp, Homo sapiens
tgcataaatacctgacactggtaggaccaccat

SEQ ID NO: 35893 - DNA, 33 bp, Homo sapiens
aatataaattgagaaaaaagtctgctaaaatct

SEQ ID NO: 35894 - DNA, 33 bp, Homo sapiens
agctctgttattatccaccatttttgatcatgg

SEQ ID NO: 35895 - DNA, 33 bp, Homo sapiens
tcttcgaagcttccacgggtcatgctgcatatg

SEQ ID NO: 35896 - DNA, 33 bp, Homo sapiens
ctctttttgctgactacactctcctgggcaatc

SEQ ID NO: 35897 - DNA, 33 bp, Homo sapiens
tcttgaagtgagaagactatcctgatgggctcg

SEQ ID NO: 35898 - DNA, 33 bp, Homo sapiens
caggagacacaaagggaaagatcctagttctct

SEQ ID NO: 35899 - DNA, 33 bp, Homo sapiens
aaggaatgagtcagaaagaggcaacacaggggt

SEQ ID NO: 35900 - DNA, 33 bp, Homo sapiens
aaacaagtctcagcacaggatttaaattccaca

SEQ ID NO: 35901 - DNA, 33 bp, Homo sapiens
ctgtgctattggcctccatatcctccttggacc

SEQ ID NO: 35902 - DNA, 33 bp, Homo sapiens
agccccatcggatgaacattgccattgcccaaa

SEQ ID NO: 35903 - DNA, 33 bp, Homo sapiens
ccatctgccttataaaaaggttgacaggtgggc

SEQ ID NO: 35904 - DNA, 33 bp, Homo sapiens
gacaggtgggaaggcaccttttcagagagagga

SEQ ID NO: 35905 - DNA, 33 bp, Homo sapiens
ctacactgactcttagcacttctttcagcagct

SEQ ID NO: 35906 - DNA, 33 bp, Homo sapiens
tacaggtaagcacacaatcgtaacgaacttccc

SEQ ID NO: 35907 - DNA, 33 bp, Homo sapiens
gactgagatttaaagccgaacttagactgaaac

SEQ ID NO: 35908 - DNA, 51 bp, Homo sapiens
ttttagttggttcattaaccaaaagagttgttgtttgccagtctttggatg

SEQ ID NO: 35909 - DNA, 33 bp, Homo sapiens
gagaggaggcaaaatgcataggagacagtggga

SEQ ID NO: 35910 - DNA, 33 bp, Homo sapiens
tatcacctcagaatgaaccggaacccgtaaaga

SEQ ID NO: 35911 - DNA, 51 bp, Homo sapiens
acttgtagcacataatatattgttacggggtgagtaaatgatcattaattg

SEQ ID NO: 35912 - DNA, 33 bp, Homo sapiens
cttttctatttgttggacatatgaactatagcc

SEQ ID NO: 35913 - DNA, 33 bp, Homo sapiens
acacagacacaaacaaagttaggaagcattgca

SEQ ID NO: 35914 - DNA, 33 bp, Homo sapiens
gagtacttgcctcatacggcagattcttcattc

SEQ ID NO: 35915 - DNA, 33 bp, Homo sapiens
agaatggctgaatttgcactgtgagggaactca

SEQ ID NO: 35916 - DNA, 51 bp, Homo sapiens
ggatacagaagctgtagaaccatagaccaatagagtttaaaacttgaaaga

SEQ ID NO: 35917 - DNA, 33 bp, Homo sapiens
ttttaactgtaaagtaatacattgctaagtgga

SEQ ID NO: 35918 - DNA, 33 bp, Homo sapiens
tcactggatgatcttgaattaactatgctcagc

SEQ ID NO: 35919 - DNA, 33 bp, Homo sapiens
aaggagaacccaggacactcctcagcctgatgg

SEQ ID NO: 35920 - DNA, 33 bp, Homo sapiens
aagggtgccatccttacgacgaggaaggacgag

SEQ ID NO: 35921 - DNA, 33 bp, Homo sapiens
acacaggcactactcacatacactcagacacat

SEQ ID NO: 35922 - DNA, 33 bp, Homo sapiens
tcctcctctttaatcacccagactgctacagtt

SEQ ID NO: 35923 - DNA, 33 bp, Homo sapiens
aaaaaggcattgtttccagagctaggctaccta

SEQ ID NO: 35924 - DNA, 33 bp, Homo sapiens
actggatgcccattaactaattcctgtactagt

SEQ ID NO: 35925 - DNA, 33 bp, Homo sapiens
gaggaatctgttatgtaaacttccaagcagacg

SEQ ID NO: 35926 - DNA, 51 bp, Homo sapiens
gatcttggattagactcacctggaacatatgtctattataggtcatctgta

SEQ ID NO: 35927 - DNA, 33 bp, Homo sapiens
ctagctcacacttaaaccttatattgcatttta

SEQ ID NO: 35928 - DNA, 33 bp, Homo sapiens
gtatagcaatagcataactctatgtagacgcta

SEQ ID NO: 35929 - DNA, 33 bp, Homo sapiens
ctcttgaagcaatggaccaagaaacttgtggat

SEQ ID NO: 35930 - DNA, 33 bp, Homo sapiens
ttaaaatgtatgaaaaattattgttgcctgtgg

SEQ ID NO: 35931 - DNA, 33 bp, Homo sapiens
gtgctcaagatttgctaaagataatgatagatt

SEQ ID NO: 35932 - DNA, 33 bp, Homo sapiens
tgattatattaatatcaaactttcaggaccatc

SEQ ID NO: 35933 - DNA, 33 bp, Homo sapiens
actgagaaatgagtgacgtgaagaggtgactag

SEQ ID NO: 35934 - DNA, 33 bp, Homo sapiens
gaatccaaaatgaccacgtgggtacaataaacc

SEQ ID NO: 35935 - DNA, 51 bp, Homo sapiens
taagctttctgtccttgaattgtttcaaaacactggacagaggtcttccta

SEQ ID NO: 35936 - DNA, 33 bp, Homo sapiens
gattaaatcattataacaactcgataaggcagt

SEQ ID NO: 35937 - DNA, 33 bp, Homo sapiens
gggaagttgtgtgtcacgcctggagtcaccagt

SEQ ID NO: 35938 - DNA, 33 bp, Homo sapiens
atttctgtatatgatacgtttcccacacttttc

SEQ ID NO: 35939 - DNA, 33 bp, Homo sapiens
acttactcttctggaagctgatccaggtgggtg

SEQ ID NO: 35940 - DNA, 33 bp, Homo sapiens
ttgagaaagcctcaaccaaaccttattgaattt

SEQ ID NO: 35941 - DNA, 33 bp, Homo sapiens
cctctctatccagccaactgaggagaaaaaagg

SEQ ID NO: 35942 - DNA, 33 bp, Homo sapiens
ttctgatcaagttgcacatctgatcaagttaca

SEQ ID NO: 35943 - DNA, 33 bp, Homo sapiens
gtgtggtaagccaggccataagttgaaggaaaa

SEQ ID NO: 35944 - DNA, 33 bp, Homo sapiens
atgctaagagtagtgacaagcactgaaagggtg

SEQ ID NO: 35945 - DNA, 33 bp, Homo sapiens
ggggagacaggaccacacatagtttgcagggtc

SEQ ID NO: 35946 - DNA, 33 bp, Homo sapiens
gtagagggttttgagagccaggctgaagagttt

SEQ ID NO: 35947 - DNA, 33 bp, Homo sapiens
tgcaggagaacggatcaagtggaaaattttatc

SEQ ID NO: 35948 - DNA, 33 bp, Homo sapiens
acttaattctcataacaataaaactgatttaaa

SEQ ID NO: 35949 - DNA, 33 bp, Homo sapiens
agttaagatgtttgcacatatattctctgtcac

SEQ ID NO: 35950 - DNA, 51 bp, Homo sapiens
caaaggcaatagtggactcttaaccagcacattagtcattgttttaataga

SEQ ID NO: 35951 - DNA, 33 bp, Homo sapiens
tcaaatgaatagggaactaatcctttctcttca

SEQ ID NO: 35952 - DNA, 33 bp, Homo sapiens
catcagagccatcagaatcagggtacatattga

SEQ ID NO: 35953 - DNA, 33 bp, Homo sapiens
tgtttggcatagtccaatgaaaaggaagaaaga

SEQ ID NO: 35954 - DNA, 33 bp, Homo sapiens
tgacctcaagaaggtacaggtggatagatttga

SEQ ID NO: 35955 - DNA, 33 bp, Homo sapiens
agatccctagagaggtaaaataatgaaatatgg

SEQ ID NO: 35956 - DNA, 33 bp, Homo sapiens
ttcttgtcaaagaggacagtggttcttcagctc

SEQ ID NO: 35957 - DNA, 33 bp, Homo sapiens
accatcttgttaggaccgtcaagctgtcccact

SEQ ID NO: 35958 - DNA, 33 bp, Homo sapiens
ataggcaagaaacagaactaggattgaagcctt

SEQ ID NO: 35959 - DNA, 33 bp, Homo sapiens
ggatcacagatgaaccacctagctgagcctttc

SEQ ID NO: 35960 - DNA, 33 bp, Homo sapiens
gtcaacaggaggctaacgtcagatcttctagaa

SEQ ID NO: 35961 - DNA, 33 bp, Homo sapiens
tgttgcctatgggtgaacatcatatgggccctg

SEQ ID NO: 35962 - DNA, 33 bp, Homo sapiens
actactcaaaggaacaactgcttgggaagaggc

SEQ ID NO: 35963 - DNA, 33 bp, Homo sapiens
tggtgttggtcatttacgggagaaggagagaga

SEQ ID NO: 35964 - DNA, 33 bp, Homo sapiens
aacaatggagtttaacacagatatgaagtaatt

SEQ ID NO: 35965 - DNA, 51 bp, Homo sapiens
tcatgcaaaatgtgacatagtatgagcgagggcggacagccttgggaacca

SEQ ID NO: 35966 - DNA, 33 bp, Homo sapiens
actttgggcttgaccacgtaagaatgacagagg

SEQ ID NO: 35967 - DNA, 33 bp, Homo sapiens
agatgacatagttgataaggaaaagtgtccttc

SEQ ID NO: 35968 - DNA, 33 bp, Homo sapiens
aattgtatcaccattcactggcattagatacaa

SEQ ID NO: 35969 - DNA, 33 bp, Homo sapiens
ggactgtaggtaataacagtgtcatgtagtcag

SEQ ID NO: 35970 - DNA, 33 bp, Homo sapiens
ggcaggtgaacgagcaatagtcgcaggcgaact

SEQ ID NO: 35971 - DNA, 33 bp, Homo sapiens
tgactcctataaagccagagaatgaggaaaaca

SEQ ID NO: 35972 - DNA, 33 bp, Homo sapiens
aagttgcctaagcccagctagagagtacctgtt

SEQ ID NO: 35973 - DNA, 33 bp, Homo sapiens
catgattaaggataagcctgtctacaacaagcg

SEQ ID NO: 35974 - DNA, 33 bp, Homo sapiens
cagctgtgctctacttcaagaaatttgacattt

SEQ ID NO: 35975 - DNA, 33 bp, Homo sapiens
aagaggctgtgaataacggaatggtgtgtaaat

SEQ ID NO: 35976 - DNA, 33 bp, Homo sapiens
caagttaggccttgaaacaaaatgaagacacca

SEQ ID NO: 35977 - DNA, 33 bp, Homo sapiens
gtagtagtgaccataccaagaggagaaactcag

SEQ ID NO: 35978 - DNA, 33 bp, Homo sapiens
ctgggccctctgcctcgatgctggaagacgtgg

SEQ ID NO: 35979 - DNA, 33 bp, Homo sapiens
tagtccataaagttccagctcatagcaggagag

SEQ ID NO: 35980 - DNA, 33 bp, Homo sapiens
tggacaaaaccagaaaatagtgtgatttggaca

SEQ ID NO: 35981 - DNA, 33 bp, Homo sapiens
gcctggctttgtcagcagctacttagagaggtt

SEQ ID NO: 35982 - DNA, 33 bp, Homo sapiens
actatctactgaggcccgagactgcatggaggg

SEQ ID NO: 35983 - DNA, 33 bp, Homo sapiens
aactgttccatgatgacgtggcataaaagagag

SEQ ID NO: 35984 - DNA, 51 bp, Homo sapiens
ggctcctttgaatgctttcaaggacggagtaaagtttgtaagaggcatttc

SEQ ID NO: 35985 - DNA, 33 bp, Homo sapiens
ttttccagtagtgacactgatgttgggaattag

SEQ ID NO: 35986 - DNA, 33 bp, Homo sapiens
catattctgatgggacaaattggtccttgtaaa

SEQ ID NO: 35987 - DNA, 33 bp, Homo sapiens
attatgttccacagaaaagcctggaagacgtat

SEQ ID NO: 35988 - DNA, 33 bp, Homo sapiens
aagaatataatacacagtggaaatcccagaggc

SEQ ID NO: 35989 - DNA, 33 bp, Homo sapiens
cacgttgattttagcccgaggaaacctatttca

SEQ ID NO: 35990 - DNA, 33 bp, Homo sapiens
cagatattcctttgaaatcctcttttggcatct

SEQ ID NO: 35991 - DNA, 33 bp, Homo sapiens
agagctgaagaactgaaattcagagagcttgtg

SEQ ID NO: 35992 - DNA, 33 bp, Homo sapiens
tgtgactaaatgcacaatatgaggcgttggggt

SEQ ID NO: 35993 - DNA, 33 bp, Homo sapiens
cagctctggagaacacacttttactttagtcag

SEQ ID NO: 35994 - DNA, 33 bp, Homo sapiens
ataccaacagcctggaatcactggctgagatga

SEQ ID NO: 35995 - DNA, 33 bp, Homo sapiens
ggcatgaaagctcctacagcattgataaatttc

SEQ ID NO: 35996 - DNA, 33 bp, Homo sapiens
tattgctcctgagctgcaaatctgtacatcatg

SEQ ID NO: 35997 - DNA, 33 bp, Homo sapiens
ttaatgggtcaccaaacccccaaactctaccaa

SEQ ID NO: 35998 - DNA, 33 bp, Homo sapiens
gtaatgcctggacgtaataaagaataaagaggg

SEQ ID NO: 35999 - DNA, 33 bp, Homo sapiens
atgtttggaactactacgggagccacatcatta

SEQ ID NO: 36000 - DNA, 33 bp, Homo sapiens
ataaagctcaatgagacgtaatgttctgaaaca

SEQ ID NO: 36001 - DNA, 33 bp, Homo sapiens
aaccaggtaataagcaaagtattcagtaggtat

SEQ ID NO: 36002 - DNA, 33 bp, Homo sapiens
aatttctgattggttggattaggatcctgttcc

SEQ ID NO: 36003 - DNA, 33 bp, Homo sapiens
caccttgaggatagcaaagaaacaaaaacaaag

SEQ ID NO: 36004 - DNA, 33 bp, Homo sapiens
ttgaagatggctaaaaactcttgtagtgaaacc

SEQ ID NO: 36005 - DNA, 33 bp, Homo sapiens
tcttaactgtctgtgacgaatctgataaaattt

SEQ ID NO: 36006 - DNA, 33 bp, Homo sapiens
ttccctgcatatgccaagttgattaattttatt

SEQ ID NO: 36007 - DNA, 33 bp, Homo sapiens
caaagcacaatgcttaaatagtctgactagttt

SEQ ID NO: 36008 - DNA, 33 bp, Homo sapiens
aaaagtgagactcctccagatggactgaaacta

SEQ ID NO: 36009 - DNA, 33 bp, Homo sapiens
gtgtgaagccacactaacacaaaagtgagactc

SEQ ID NO: 36010 - DNA, 33 bp, Homo sapiens
gtattctgcacagttacgaaaacaaaaataaat

SEQ ID NO: 36011 - DNA, 33 bp, Homo sapiens
ttccccattaaataccaggcacctcatttctcc

SEQ ID NO: 36012 - DNA, 33 bp, Homo sapiens
caggctgccagtggaaacaatatgcacgttgtg

SEQ ID NO: 36013 - DNA, 33 bp, Homo sapiens
tgtcaatgcaaataagccctacatttaggcccc

SEQ ID NO: 36014 - DNA, 33 bp, Homo sapiens
cctttcttcagcaaaagttagacacaccattct

SEQ ID NO: 36015 - DNA, 33 bp, Homo sapiens
catcagcacaaagagaagactcaccaggggaga

SEQ ID NO: 36016 - DNA, 33 bp, Homo sapiens
ggttggacctcacaataaacagcagaacagaaa

SEQ ID NO: 36017 - DNA, 33 bp, Homo sapiens
acttctaaataccacaggaagagaactaggagt

SEQ ID NO: 36018 - DNA, 33 bp, Homo sapiens
cccccacactaacccagctcctagcacaggaag

SEQ ID NO: 36019 - DNA, 33 bp, Homo sapiens
atattcagtgacaacaacttttaggagcttgaa

SEQ ID NO: 36020 - DNA, 51 bp, Homo sapiens
gagcagttttggaggataaagacagcagttggttagatcagatccttcatt

SEQ ID NO: 36021 - DNA, 51 bp, Homo sapiens
atctcgagaaaagtctggtcaggatcagggagaaagatcttattgggtata

SEQ ID NO: 36022 - DNA, 51 bp, Homo sapiens
aactcaggtcttctaaaatatttacaaagcaggtgagctagagagaacttc

SEQ ID NO: 36023 - DNA, 51 bp, Homo sapiens
gatttattggaaggagttggcttacatgattgtgaggtctaggcaagtatg

SEQ ID NO: 36024 - DNA, 33 bp, Homo sapiens
aatcgcagtcacataaacttcaaaaacatggct

SEQ ID NO: 36025 - DNA, 33 bp, Homo sapiens
attcttatcttcagcaactgttatactttaatt

SEQ ID NO: 36026 - DNA, 33 bp, Homo sapiens
agtgagtggctctagggcattttctcctggctc

SEQ ID NO: 36027 - DNA, 33 bp, Homo sapiens
ggagagatggtaaagcccatgcaggaagaaggg

SEQ ID NO: 36028 - DNA, 33 bp, Homo sapiens
aggtagccgttttctacggaaacttcacactaa

SEQ ID NO: 36029 - DNA, 33 bp, Homo sapiens
catctactgctacccaaaagttgccatcagctc

SEQ ID NO: 36030 - DNA, 33 bp, Homo sapiens
agtgtgtcttacagtgaaatgacagttcagaca

SEQ ID NO: 36031 - DNA, 33 bp, Homo sapiens
cagaaggtaaaggacacggaactgaagcactag

SEQ ID NO: 36032 - DNA, 33 bp, Homo sapiens
gcatgattctggaaaccaacagatagaaatagg

SEQ ID NO: 36033 - DNA, 33 bp, Homo sapiens
atgaggaagctggtgaagtaaggaaaggtgaga

SEQ ID NO: 36034 - DNA, 33 bp, Homo sapiens
atctctccacatgtgcagagcatcagtttttgc

SEQ ID NO: 36035 - DNA, 33 bp, Homo sapiens
ggtttcctgagtaaaaacagagtctaacagccc

SEQ ID NO: 36036 - DNA, 33 bp, Homo sapiens
ctacttgactagccaactcattccacctcttga

SEQ ID NO: 36037 - DNA, 33 bp, Homo sapiens
tgttttctctctatgacggtagagtattggcct

SEQ ID NO: 36038 - DNA, 33 bp, Homo sapiens
gatcttcctatcaaagaaagaccagccctctac

SEQ ID NO: 36039 - DNA, 33 bp, Homo sapiens
gcataagaggacaaaaaggaactccactgcaga

SEQ ID NO: 36040 - DNA, 33 bp, Homo sapiens
gcttcctttttttccacaggtattgatcccaaa

SEQ ID NO: 36041 - DNA, 33 bp, Homo sapiens
ttctgtatttccttcagaaagcaagctccacta

SEQ ID NO: 36042 - DNA, 33 bp, Homo sapiens
gagacctatttaaccacaagctctggtttctcc

SEQ ID NO: 36043 - DNA, 33 bp, Homo sapiens
cacaaagtgaatttaagtatgcaagaggtggat

SEQ ID NO: 36044 - DNA, 33 bp, Homo sapiens
gccatttcaggcacaacgtaggcagtgggtgtg

SEQ ID NO: 36045 - DNA, 33 bp, Homo sapiens
gcaaaggattcagacaatagccttcctcggccc

SEQ ID NO: 36046 - DNA, 33 bp, Homo sapiens
gatatctttctgtctacgctcccatcttttgcc

SEQ ID NO: 36047 - DNA, 33 bp, Homo sapiens
actactaaacacttgacacgtctattgtgtctc

SEQ ID NO: 36048 - DNA, 33 bp, Homo sapiens
ctcctcatgctcacaaatctcttaagccctttc

SEQ ID NO: 36049 - DNA, 33 bp, Homo sapiens
agtcaaccgaggacaacgccctgccaaacagag

SEQ ID NO: 36050 - DNA, 33 bp, Homo sapiens
aagaggaaagctaccaatcttcctgatggatac

SEQ ID NO: 36051 - DNA, 33 bp, Homo sapiens
gttgaattattgaccaccgcccatgcaatttcc

SEQ ID NO: 36052 - DNA, 33 bp, Homo sapiens
ctggtgaccataattcaaggcctgatttggttt

SEQ ID NO: 36053 - DNA, 33 bp, Homo sapiens
gtgggaaccactgtgcaattttgaatgtgcggc

SEQ ID NO: 36054 - DNA, 33 bp, Homo sapiens
gtacttagggagacaacgctctttcaagaaaac

SEQ ID NO: 36055 - DNA, 33 bp, Homo sapiens
cctgctctatccaacaatccttgtacacagaga

SEQ ID NO: 36056 - DNA, 33 bp, Homo sapiens
acttttcatttgtataaggtagctgtttaggag

SEQ ID NO: 36057 - DNA, 33 bp, Homo sapiens
acgagactgaataaaactgttcaaactgtgctc

SEQ ID NO: 36058 - DNA, 33 bp, Homo sapiens
tggctttctaccccaactacgaggactgccaga

SEQ ID NO: 36059 - DNA, 33 bp, Homo sapiens
acaccacaccaaagtaagcggtttcccaggaag

SEQ ID NO: 36060 - DNA, 33 bp, Homo sapiens
atgagagtagcagttcccaggatgttccgctac

SEQ ID NO: 36061 - DNA, 33 bp, Homo sapiens
agctggtcagttgtgacgttttggatggcatct

SEQ ID NO: 36062 - DNA, 33 bp, Homo sapiens
gaggaacggaatgcgaacgttgtctctgttact

SEQ ID NO: 36063 - DNA, 33 bp, Homo sapiens
gctgtggcgttttccaatcaatcatctgtgggt

SEQ ID NO: 36064 - DNA, 33 bp, Homo sapiens
gcggctgtaacgaaacaacaccgaaagtgccgt

SEQ ID NO: 36065 - DNA, 33 bp, Homo sapiens
tctgcctcctggtccccgcagatcgcccagacc

SEQ ID NO: 36066 - DNA, 33 bp, Homo sapiens
agcactgtgatgctgcgacagttgacctgataa

SEQ ID NO: 36067 - DNA, 33 bp, Homo sapiens
atttgactgctttagacctgtgaaaatgactgt

SEQ ID NO: 36068 - DNA, 33 bp, Homo sapiens
aaaggctggcaaaatacgtatcattgttgaagc

SEQ ID NO: 36069 - DNA, 33 bp, Homo sapiens
gcctggcagtgtcaagcctgaaacaaagcaata

SEQ ID NO: 36070 - DNA, 33 bp, Homo sapiens
gatgtcctatcacctcactattgggaagggggc

SEQ ID NO: 36071 - DNA, 33 bp, Homo sapiens
gagatttctaaaagcacatttcgatcaggcaca

SEQ ID NO: 36072 - DNA, 33 bp, Homo sapiens
aattggcatattcccccgagactcctttttgac

SEQ ID NO: 36073 - DNA, 33 bp, Homo sapiens
aatattggtatctataggaagggctaaagtaac

SEQ ID NO: 36074 - DNA, 33 bp, Homo sapiens
tgtaggagtgtacaaaataaaaccagaaatttt

SEQ ID NO: 36075 - DNA, 33 bp, Homo sapiens
ttgatgccttagacttcaaagctgtctttttgc

SEQ ID NO: 36076 - DNA, 33 bp, Homo sapiens
tttgcccttatgggacgctaatgacaacaaaat

SEQ ID NO: 36077 - DNA, 33 bp, Homo sapiens
attcagctttgtccaaccacgtgaaatgaagat

SEQ ID NO: 36078 - DNA, 33 bp, Homo sapiens
gtgtgtctctggtcacaatattttcatcagcca

SEQ ID NO: 36079 - DNA, 33 bp, Homo sapiens
tttcagctctcatattaaaaacaagtgtccttt

SEQ ID NO: 36080 - DNA, 33 bp, Homo sapiens
ctgatgtcctctgatcaacaagtaaagtgaaaa

SEQ ID NO: 36081 - DNA, 51 bp, Homo sapiens
aggtgtaatttccaattccattaacggaacgagacatgaatgtttccttaa

SEQ ID NO: 36082 - DNA, 33 bp, Homo sapiens
ctttcttctttgaaagcagtcaataacagtgca

SEQ ID NO: 36083 - DNA, 33 bp, Homo sapiens
aacaaatctgtgtttaaaataagcgtaccaaat

SEQ ID NO: 36084 - DNA, 33 bp, Homo sapiens
caaaataaaaggtgtagagcaatttcagcggat

SEQ ID NO: 36085 - DNA, 51 bp, Homo sapiens
ccagtgatatagatggttgaaaaacggatgattccactgttttaaaattgt

SEQ ID NO: 36086 - DNA, 33 bp, Homo sapiens
cttttgtgtttcttaaaaagctgctctattagg

SEQ ID NO: 36087 - DNA, 33 bp, Homo sapiens
aaaaattgaacagagccgctaaaaggtattgaa

SEQ ID NO: 36088 - DNA, 33 bp, Homo sapiens
ctaacatgcagcccggaagatccagtgtcaggt

SEQ ID NO: 36089 - DNA, 33 bp, Homo sapiens
tgttggattttaagtgcaccctacatgcattct

SEQ ID NO: 36090 - DNA, 33 bp, Homo sapiens
gcttatctttgtcagtcaaaagaaagtttgctg

SEQ ID NO: 36091 - DNA, 33 bp, Homo sapiens
tttaagtagaagctgacgaaaatatctttctca

SEQ ID NO: 36092 - DNA, 51 bp, Homo sapiens
gatagtgctgagaaagaaatcttaaccatagctgaaataaattgtttatat

SEQ ID NO: 36093 - DNA, 33 bp, Homo sapiens
agtaatgtgaataagtaaagtgagctttcatga

SEQ ID NO: 36094 - DNA, 51 bp, Homo sapiens
aacacagggcttctgtggaaacgcacggaagaagcatttacactcaatcat

SEQ ID NO: 36095 - DNA, 33 bp, Homo sapiens
ggttactcaaggtcacaatgactgagcaaactc

SEQ ID NO: 36096 - DNA, 33 bp, Homo sapiens
ttacttttgtaagtaactgcaaactgtcttcca

SEQ ID NO: 36097 - DNA, 33 bp, Homo sapiens
gacttaataaagagccacatgagtcgcctcagc

SEQ ID NO: 36098 - DNA, 33 bp, Homo sapiens
gacaaatgactgtttacactctgcaaaccattc

SEQ ID NO: 36099 - DNA, 33 bp, Homo sapiens
ttagtagaatttttaaactggctttccatggat

SEQ ID NO: 36100 - DNA, 33 bp, Homo sapiens
gtttccattgctcaacacatttttgaaattcca

SEQ ID NO: 36101 - DNA, 33 bp, Homo sapiens
tgaggtcccaagtgaacagagaggcctttggac

SEQ ID NO: 36102 - DNA, 33 bp, Homo sapiens
gcgtaagtcagggaaacatatacattaacaaat

SEQ ID NO: 36103 - DNA, 33 bp, Homo sapiens
ccaaaaaggcctgtcaatcagctataaatgggt

SEQ ID NO: 36104 - DNA, 33 bp, Homo sapiens
gattgtaacacaattcacaatcaagatttgtct

SEQ ID NO: 36105 - DNA, 33 bp, Homo sapiens
gggtaactgaaaccaaagaaatgactccagtat

SEQ ID NO: 36106 - DNA, 33 bp, Homo sapiens
atgtttttttggtgaacttactcctttatcatt

SEQ ID NO: 36107 - DNA, 51 bp, Homo sapiens
cagtctctgttaaatttatccgataacatactgaaatccttgtctgtgatc

SEQ ID NO: 36108 - DNA, 33 bp, Homo sapiens
tcacaggccttgaactcacttgccttgaccaat

SEQ ID NO: 36109 - DNA, 33 bp, Homo sapiens
gtacctgaggacccgcaacctactcctgtaccc

SEQ ID NO: 36110 - DNA, 33 bp, Homo sapiens
agaggataaagaaaaaatgacagtaaatcaaag

SEQ ID NO: 36111 - DNA, 33 bp, Homo sapiens
gatgtcaaggctagcagatcaaaaaagcggaga

SEQ ID NO: 36112 - DNA, 33 bp, Homo sapiens
tggcggggattctcatgaacaccatgtggctaa

SEQ ID NO: 36113 - DNA, 33 bp, Homo sapiens
agactcaacttttcaacagacctgttttatctt

SEQ ID NO: 36114 - DNA, 33 bp, Homo sapiens
aaacttgacttgtaaacctaaggaaggatcaag

SEQ ID NO: 36115 - DNA, 51 bp, Homo sapiens
ggagtaggagaaacaggctagtgctaaaagcaaagtgaaaggctgacagag

SEQ ID NO: 36116 - DNA, 33 bp, Homo sapiens
gggagcggtttaacaaagactgaataaggagag

SEQ ID NO: 36117 - DNA, 33 bp, Homo sapiens
ttagcacaatgccagccgagggtgtgtatatgg

SEQ ID NO: 36118 - DNA, 33 bp, Homo sapiens
actcatagttattcaaccactgtcatgcctgca

SEQ ID NO: 36119 - DNA, 33 bp, Homo sapiens
aatgtctgccatacacaactaccaagcccttag

SEQ ID NO: 36120 - DNA, 33 bp, Homo sapiens
ctccactctttacttgcatattctggaaacaca

SEQ ID NO: 36121 - DNA, 33 bp, Homo sapiens
tggaacagcatccaagaaatactacttgatggc

SEQ ID NO: 36122 - DNA, 33 bp, Homo sapiens
tgtgtaaaatgtacctcaataaatttgttgttt

SEQ ID NO: 36123 - DNA, 33 bp, Homo sapiens
tgactcttggattttacagaaccacaagtcctg

SEQ ID NO: 36124 - DNA, 33 bp, Homo sapiens
ttttataggactcaacaggctgcataaaagggc

SEQ ID NO: 36125 - DNA, 33 bp, Homo sapiens
gcaacaatatgtgtctcaaattaaccaggcatg

SEQ ID NO: 36126 - DNA, 33 bp, Homo sapiens
ttgtggttgtttactgcaactttgaagcattgg

SEQ ID NO: 36127 - DNA, 33 bp, Homo sapiens
taaccggtaccagtcaaggaaagctgggctcta

SEQ ID NO: 36128 - DNA, 33 bp, Homo sapiens
cttcacaattaaactacgtgcccactctttcac

SEQ ID NO: 36129 - DNA, 33 bp, Homo sapiens
tctgacattcctgtagccctagacagttattat

SEQ ID NO: 36130 - DNA, 33 bp, Homo sapiens
tataaatagatgtccactgagatacacaaaaaa

SEQ ID NO: 36131 - DNA, 51 bp, Homo sapiens
tatttttttttaaataagctgggaaaaggatcagctaactcaaggaattaa

SEQ ID NO: 36132 - DNA, 33 bp, Homo sapiens
atcagggctgccttacaagatttcctgaaggaa

SEQ ID NO: 36133 - DNA, 33 bp, Homo sapiens
gctaacactccatcaccgaatccttgacacttg

SEQ ID NO: 36134 - DNA, 33 bp, Homo sapiens
gggcacagaaggtaaccgcggattgagagcagg

SEQ ID NO: 36135 - DNA, 33 bp, Homo sapiens
tacagacatagacaagaatgaaattatagatat

SEQ ID NO: 36136 - DNA, 33 bp, Homo sapiens
ttctgccaagtaggcaaccctgaaggagacttg

SEQ ID NO: 36137 - DNA, 33 bp, Homo sapiens
tcagtgaatcatttgcaaagcagagaagatgag

SEQ ID NO: 36138 - DNA, 33 bp, Homo sapiens
tgagtactgatggcaacagctttgaagatgatt

SEQ ID NO: 36139 - DNA, 51 bp, Homo sapiens
gcccagctaatctttacattgaccaaaagtgctttgcctacatagcactgc

SEQ ID NO: 36140 - DNA, 33 bp, Homo sapiens
atcattattatggcacacggcagtattaagaag

SEQ ID NO: 36141 - DNA, 33 bp, Homo sapiens
gggttctgggactataaaaatgaataaaatacc

SEQ ID NO: 36142 - DNA, 33 bp, Homo sapiens
tacctgcattttcctagtaacgacagggctttc

SEQ ID NO: 36143 - DNA, 33 bp, Homo sapiens
ctggatgagacagtcacgtgtattagaggtatg

SEQ ID NO: 36144 - DNA, 33 bp, Homo sapiens
ctaccttgttcttctccaaaagagtctttgtta

SEQ ID NO: 36145 - DNA, 33 bp, Homo sapiens
gagaaataatgctcaccgctgtctttaccattt

SEQ ID NO: 36146 - DNA, 51 bp, Homo sapiens
gcctagactgaatagaagagtgttacgatgatgagaaagcaaaatctttat

SEQ ID NO: 36147 - DNA, 33 bp, Homo sapiens
actgcagacaagttcacgggaaaggaaagttac

SEQ ID NO: 36148 - DNA, 33 bp, Homo sapiens
gaaaggaaagatgaccaagagttgatgggggaa

SEQ ID NO: 36149 - DNA, 33 bp, Homo sapiens
agtatggtcttttatcccttaacaactttctgt

SEQ ID NO: 36150 - DNA, 33 bp, Homo sapiens
tcctgagatggtctagcatagaaggcctcttgg

SEQ ID NO: 36151 - DNA, 51 bp, Homo sapiens
caagcattactgctatcagtcttcagatttcagtggttaagttgatcttca

SEQ ID NO: 36152 - DNA, 51 bp, Homo sapiens
gacaacatgcagaggaactgagtcaaaaaggaatgtataagaatggcatat

SEQ ID NO: 36153 - DNA, 33 bp, Homo sapiens
ctgtcattttgctgcaagttttttatatgccat

SEQ ID NO: 36154 - DNA, 33 bp, Homo sapiens
ggctggtaaatagttacgctgggtcttaagctt

SEQ ID NO: 36155 - DNA, 51 bp, Homo sapiens
gattatgttcaatgagatatatataagatagcatcaataaacattagttct

SEQ ID NO: 36156 - DNA, 33 bp, Homo sapiens
aagagttgttatcagaggatctcttagtgaagt

SEQ ID NO: 36157 - DNA, 33 bp, Homo sapiens
aaacctttgcctcctacaaaagtagacagctgt

SEQ ID NO: 36158 - DNA, 33 bp, Homo sapiens
cgcaaaaaccatatacaataccggctatattga

SEQ ID NO: 36159 - DNA, 33 bp, Homo sapiens
ctccattaatcgttagcacatctacccagttat

SEQ ID NO: 36160 - DNA, 33 bp, Homo sapiens
ttcactttcgcaacctcaccatcaactttgtag

SEQ ID NO: 36161 - DNA, 33 bp, Homo sapiens
agttgtgaactgtagtcaattcatgagtgattg

SEQ ID NO: 36162 - DNA, 33 bp, Homo sapiens
cgtatgactgtagatacgtggggtaatttctgg

SEQ ID NO: 36163 - DNA, 33 bp, Homo sapiens
atgcatggtttatatgcagatactaagctgttt

SEQ ID NO: 36164 - DNA, 33 bp, Homo sapiens
ctaggaagagtgaataccttcttgtgatggtgg

SEQ ID NO: 36165 - DNA, 33 bp, Homo sapiens
acaaatgcatccgtccccacagtggtgtagcac

SEQ ID NO: 36166 - DNA, 33 bp, Homo sapiens
gtgactttgaacaaacgaccctttacctcactt

SEQ ID NO: 36167 - DNA, 33 bp, Homo sapiens
gaagcctagaaccatccgaggcagccgtcttgt

SEQ ID NO: 36168 - DNA, 33 bp, Homo sapiens
cagagtggtgtctacaaagcaatgaaatgtggt

SEQ ID NO: 36169 - DNA, 51 bp, Homo sapiens
aggttcaataggcaaacagtataaagtggccaaccagtaaacctgtgtata

SEQ ID NO: 36170 - DNA, 33 bp, Homo sapiens
gtttaagaaaggcctccgacttattcaagtctg

SEQ ID NO: 36171 - DNA, 33 bp, Homo sapiens
ttatttggccagtgccaagaggaattgcaatca

SEQ ID NO: 36172 - DNA, 33 bp, Homo sapiens
gcaacaaccaaatcaacacaaatggaaaatata

SEQ ID NO: 36173 - DNA, 33 bp, Homo sapiens
ttagtaaaaggtagaaatctgtttacatttgtt

SEQ ID NO: 36174 - DNA, 33 bp, Homo sapiens
tatgacatgctaaggacgcattgcttttctcca

SEQ ID NO: 36175 - DNA, 33 bp, Homo sapiens
aactggaaaatacagaagtgtttttgcatcccc

SEQ ID NO: 36176 - DNA, 51 bp, Homo sapiens
ttaaaacttttatctctggctctctcaattttgaattaaaccagtcccatc

SEQ ID NO: 36177 - DNA, 33 bp, Homo sapiens
agccatatattgccgcccactttgatgtccttc

SEQ ID NO: 36178 - DNA, 33 bp, Homo sapiens
gttctttcagctcataggatttggttgatatga

SEQ ID NO: 36179 - DNA, 33 bp, Homo sapiens
cacagaagaaagtagactccatcagcaaaattg

SEQ ID NO: 36180 - DNA, 33 bp, Homo sapiens
actttgtgactcttaacattacggagtgccagg

SEQ ID NO: 36181 - DNA, 33 bp, Homo sapiens
gttataattggtatcgcatctctaaccaagcgt

SEQ ID NO: 36182 - DNA, 33 bp, Homo sapiens
aaatcaacatagtctaataatagatgatttaac

SEQ ID NO: 36183 - DNA, 51 bp, Homo sapiens
aaaaatccgcctatctaggcttatgaatgttatataataccacagatatga

SEQ ID NO: 36184 - DNA, 33 bp, Homo sapiens
aagctgctaactctataaaacaagtgctacatg

SEQ ID NO: 36185 - DNA, 33 bp, Homo sapiens
tactaatataacaacacggaccctgcggcgtct

SEQ ID NO: 36186 - DNA, 33 bp, Homo sapiens
tctcatgaaaatttaacgaagaaagtgcattca

SEQ ID NO: 36187 - DNA, 33 bp, Homo sapiens
gcactctcttaacatacaggtagagcattttgt

SEQ ID NO: 36188 - DNA, 33 bp, Homo sapiens
gctgtcagtgagttaaagtggctgaaacagatc

SEQ ID NO: 36189 - DNA, 33 bp, Homo sapiens
cgagggttttgttggactactggctcttctttg

SEQ ID NO: 36190 - DNA, 33 bp, Homo sapiens
atcaatgttttagagacgtttaatagactagta

SEQ ID NO: 36191 - DNA, 33 bp, Homo sapiens
tttgtcagattcattgaaagtatgttctcccat

SEQ ID NO: 36192 - DNA, 33 bp, Homo sapiens
gattaataaacgtaagcagtatacatggtcaat

SEQ ID NO: 36193 - DNA, 33 bp, Homo sapiens
aagcttaacacaaaatgataaagcatcatactg

SEQ ID NO: 36194 - DNA, 33 bp, Homo sapiens
agaggttaacttgccaactgactgaatctattt

SEQ ID NO: 36195 - DNA, 51 bp, Homo sapiens
ctgtagccatctttggtagttagtcaagagaattccaacggctcaggaaga

SEQ ID NO: 36196 - DNA, 33 bp, Homo sapiens
tacctttctccacaataaacagaaatttgagag

SEQ ID NO: 36197 - DNA, 33 bp, Homo sapiens
agaaatcacagtaccactgaagtcaaataagat

SEQ ID NO: 36198 - DNA, 51 bp, Homo sapiens
aatcagagttgcaggtgaatggtcacgctttaaatggaaaactgagccagg

SEQ ID NO: 36199 - DNA, 51 bp, Homo sapiens
tttatttagatttgtatagttactaccattgcattttaagctgtttaatta

SEQ ID NO: 36200 - DNA, 33 bp, Homo sapiens
agctgtagaaatgtaccaggtaatcatcaatat

SEQ ID NO: 36201 - DNA, 33 bp, Homo sapiens
aggttcttctgatgcacatggactaagatcaca

SEQ ID NO: 36202 - DNA, 33 bp, Homo sapiens
tctttagcccaacttacatttgtaaactacagt

SEQ ID NO: 36203 - DNA, 51 bp, Homo sapiens
tttataaaatgtttatcctcctcatcatctaatttgtttcctgccgctgaa

SEQ ID NO: 36204 - DNA, 33 bp, Homo sapiens
gttggaaaaatagacagtatagttggaagcttt

SEQ ID NO: 36205 - DNA, 51 bp, Homo sapiens
cagaagaaaccaacttcaccatttgaatcatgatattgaccaagcgttggc

SEQ ID NO: 36206 - DNA, 33 bp, Homo sapiens
aaaataggcactcatacaaatgctaggtctaag

SEQ ID NO: 36207 - DNA, 33 bp, Homo sapiens
gaaatgccagaggccaagagaaaaatgtataca

SEQ ID NO: 36208 - DNA, 33 bp, Homo sapiens
tatttataacaactcaagtggtcctcacaacag

SEQ ID NO: 36209 - DNA, 33 bp, Homo sapiens
gaatttggccagagtaaaatctgaattccagat

SEQ ID NO: 36210 - DNA, 33 bp, Homo sapiens
aacagatctatttgtggatgttttaaaggagga

SEQ ID NO: 36211 - DNA, 33 bp, Homo sapiens
ttctggagactagtgcactcttttgacgttctt

SEQ ID NO: 36212 - DNA, 33 bp, Homo sapiens
cattgtcacagggtaactctgtagatattttcg

SEQ ID NO: 36213 - DNA, 33 bp, Homo sapiens
ttgatgaagccacataaaatttcaggcagatta

SEQ ID NO: 36214 - DNA, 33 bp, Homo sapiens
gagttgctgattttagcaataacaccaagctaa

SEQ ID NO: 36215 - DNA, 33 bp, Homo sapiens
aagatggtgaacataaatatcattgaatcaagg

SEQ ID NO: 36216 - DNA, 51 bp, Homo sapiens
ttttacaggtaatacattatttgaactgatattgaataaaagtatgatgtg

SEQ ID NO: 36217 - DNA, 33 bp, Homo sapiens
ctagatttacaaaacaatgacaacaaatataac

SEQ ID NO: 36218 - DNA, 33 bp, Homo sapiens
acaagcacctctatggccaccactactatgact

SEQ ID NO: 36219 - DNA, 33 bp, Homo sapiens
tgacaaacagacctaccaaaatgtgctcgacat

SEQ ID NO: 36220 - DNA, 33 bp, Homo sapiens
ctgaagagatatttgcactcttgtatttgttgc

SEQ ID NO: 36221 - DNA, 33 bp, Homo sapiens
ggaaccaccaagtgcacgtacccaagaaaggct

SEQ ID NO: 36222 - DNA, 33 bp, Homo sapiens
cttcaagactgtaaagaagtcaaccatttgtcc

SEQ ID NO: 36223 - DNA, 51 bp, Homo sapiens
tccttgagttgaacagcatctctccaattacaccttgcaatatctacttgt

SEQ ID NO: 36224 - DNA, 33 bp, Homo sapiens
taggctggatatgaaagatggaagctccagatt

SEQ ID NO: 36225 - DNA, 33 bp, Homo sapiens
agttgagagtcttgaaggactgacccataagtg

SEQ ID NO: 36226 - DNA, 33 bp, Homo sapiens
tgtgttctttcgataaatatctattcagatctc

SEQ ID NO: 36227 - DNA, 33 bp, Homo sapiens
accaaacaagacaaacaaccgacttcactggag

SEQ ID NO: 36228 - DNA, 33 bp, Homo sapiens
acccaatgttaatgaaatatgaaggttctactt

SEQ ID NO: 36229 - DNA, 33 bp, Homo sapiens
ttcactttaggctatcaaattcattacacaaaa

SEQ ID NO: 36230 - DNA, 33 bp, Homo sapiens
agtgctataataagcaaaagaatgcaggtgtct

SEQ ID NO: 36231 - DNA, 33 bp, Homo sapiens
atgtctgcatctttgcgcacaaaaaatatacat

SEQ ID NO: 36232 - DNA, 33 bp, Homo sapiens
tttatgtttctaaagccccaagttgaaggacaa

SEQ ID NO: 36233 - DNA, 33 bp, Homo sapiens
gtcctacagactgctacgctttatatttttatt

SEQ ID NO: 36234 - DNA, 33 bp, Homo sapiens
atatgggcagctctaacaaggaagggaaaattg

SEQ ID NO: 36235 - DNA, 33 bp, Homo sapiens
cttgttgccattggcaccaaggaaccagtttta

SEQ ID NO: 36236 - DNA, 33 bp, Homo sapiens
gtttcatcatgaggaaaggaaaagggagctgac

SEQ ID NO: 36237 - DNA, 33 bp, Homo sapiens
gtatactcaatgcttgcaacttgttttaaactc

SEQ ID NO: 36238 - DNA, 33 bp, Homo sapiens
ggtaagcctggtagccaagacaaccatgctgac

SEQ ID NO: 36239 - DNA, 33 bp, Homo sapiens
gctcagtgatgctctacaatttagcttcctgca

SEQ ID NO: 36240 - DNA, 33 bp, Homo sapiens
actaaacacagccataaaataaatagcactttt

SEQ ID NO: 36241 - DNA, 33 bp, Homo sapiens
tcctgtgacatttcaaaaagtatttgctatggc

SEQ ID NO: 36242 - DNA, 33 bp, Homo sapiens
agtcaacaagattttaagtactgcaaaaacaaa

SEQ ID NO: 36243 - DNA, 33 bp, Homo sapiens
gatctgaagaggtgaaaaggtgtaggtaggagt

SEQ ID NO: 36244 - DNA, 51 bp, Homo sapiens
caaaaatgggacagtttgaccagcactataacctatttctccaccagaaaa

SEQ ID NO: 36245 - DNA, 33 bp, Homo sapiens
cagggattgtctgagacgccttggaatgctagc

SEQ ID NO: 36246 - DNA, 33 bp, Homo sapiens
tatatgtctgagttgtcacaaaggaggagggtt

SEQ ID NO: 36247 - DNA, 33 bp, Homo sapiens
ttggtttattgtgaaacagtctcctaagattgc

SEQ ID NO: 36248 - DNA, 33 bp, Homo sapiens
ctctttaacacaacacacttaaatagaagtgag

SEQ ID NO: 36249 - DNA, 33 bp, Homo sapiens
ggaaacatctgagggtcaaagacaggtagcaac

SEQ ID NO: 36250 - DNA, 33 bp, Homo sapiens
aacaaaggagaacactcaactcgtctgcataaa

SEQ ID NO: 36251 - DNA, 33 bp, Homo sapiens
ggtcaccaaaggaaacacagattgtgggtagct

SEQ ID NO: 36252 - DNA, 33 bp, Homo sapiens
agtctctgtccactcaatgagaaaattcaagcc

SEQ ID NO: 36253 - DNA, 33 bp, Homo sapiens
taagtaatttctgaacacagtgatacatcctgg

SEQ ID NO: 36254 - DNA, 33 bp, Homo sapiens
gaagcagtttcaactaccattcatatctcactc

SEQ ID NO: 36255 - DNA, 51 bp, Homo sapiens
gcactgtcacctaactcccatttgaagtattcatgttcatccaaacaggtc

SEQ ID NO: 36256 - DNA, 33 bp, Homo sapiens
caattgtgtttctaacccctacagcaaacaaaa

SEQ ID NO: 36257 - DNA, 33 bp, Homo sapiens
cgtatattttgctttacacctgaggaatgcgca

SEQ ID NO: 36258 - DNA, 33 bp, Homo sapiens
gctgccatgttttcacaaaataataacctttca

SEQ ID NO: 36259 - DNA, 33 bp, Homo sapiens
cagcagtaaaagtaacacatccaaagaagcact

SEQ ID NO: 36260 - DNA, 33 bp, Homo sapiens
cttaggagtagaacaaatggagtttgaacctct

SEQ ID NO: 36261 - DNA, 33 bp, Homo sapiens
tcattgtctatcaacactggtttctgaattgtg

SEQ ID NO: 36262 - DNA, 33 bp, Homo sapiens
ccagtatcattctctgcagctgaatctaaggtg

SEQ ID NO: 36263 - DNA, 51 bp, Homo sapiens
cagatgttaggcctctggttattggccacttttacttgtagaacactgatc

SEQ ID NO: 36264 - DNA, 33 bp, Homo sapiens
aagttttacagcaaagaaatctaaaatcaattt

SEQ ID NO: 36265 - DNA, 33 bp, Homo sapiens
ccatgtaccaactgaaacacaggagaaataata

SEQ ID NO: 36266 - DNA, 33 bp, Homo sapiens
gtccaacacaagtaagacctcaagaaacgcttg

SEQ ID NO: 36267 - DNA, 33 bp, Homo sapiens
attatagtgaaacttcacagacgtagatcaagt

SEQ ID NO: 36268 - DNA, 33 bp, Homo sapiens
acagggctcctagactcagtacaggattagact

SEQ ID NO: 36269 - DNA, 33 bp, Homo sapiens
taggttgaaggagaaaacatatccgagagaagg

SEQ ID NO: 36270 - DNA, 33 bp, Homo sapiens
agtgtatttgtcacaggaggattggtgccttgt

SEQ ID NO: 36271 - DNA, 33 bp, Homo sapiens
ccactgcttttcctacaggaccagtgaatactc

SEQ ID NO: 36272 - DNA, 33 bp, Homo sapiens
tgggaacgtacataaacgaagcaaagcagtcat

SEQ ID NO: 36273 - DNA, 33 bp, Homo sapiens
cctttatagtaaggtacgtagttggtgttttac

SEQ ID NO: 36274 - DNA, 33 bp, Homo sapiens
tgtttataaccattaaccacactctcttcgtcc

SEQ ID NO: 36275 - DNA, 51 bp, Homo sapiens
taattcaaaacacatagctttaatgacaccgtctcagagaccacttaatct

SEQ ID NO: 36276 - DNA, 33 bp, Homo sapiens
ttctctctgatgagcaccacttagaccttcaaa

SEQ ID NO: 36277 - DNA, 33 bp, Homo sapiens
ttggaatattcaatcagctatggttgcttatga

SEQ ID NO: 36278 - DNA, 33 bp, Homo sapiens
atgcattcttatcataaacttgtgccaaagcat

SEQ ID NO: 36279 - DNA, 33 bp, Homo sapiens
tgctgtggttaattatgagagtggagccaggtg

SEQ ID NO: 36280 - DNA, 33 bp, Homo sapiens
atacatgcgtgactaccgagggccaggtgggag

SEQ ID NO: 36281 - DNA, 33 bp, Homo sapiens
tagcttgtaatagaaaccagtctcttggtaaga

SEQ ID NO: 36282 - DNA, 33 bp, Homo sapiens
tggcactagtaatagcagcaaagaagtggaaag

SEQ ID NO: 36283 - DNA, 33 bp, Homo sapiens
gctatttccttccatacaggtgtaacattttgg

SEQ ID NO: 36284 - DNA, 33 bp, Homo sapiens
ttcaagtgaggatgtaagactttcaaattgggt

SEQ ID NO: 36285 - DNA, 51 bp, Homo sapiens
gaaatagatgattctgatgattcagactatttttatgttagttctgtttag

SEQ ID NO: 36286 - DNA, 33 bp, Homo sapiens
cataaaaatatgtaaaatatcctcaaagtccaa

SEQ ID NO: 36287 - DNA, 33 bp, Homo sapiens
atgttattgagctttaagagtgtttgtatattt

SEQ ID NO: 36288 - DNA, 33 bp, Homo sapiens
tattcgttcatttaaagccctgcaaaattggca

SEQ ID NO: 36289 - DNA, 33 bp, Homo sapiens
taggtttttttcttcacgatcggaatgttttta

SEQ ID NO: 36290 - DNA, 33 bp, Homo sapiens
catccctttactaagaatagggacagttccagg

SEQ ID NO: 36291 - DNA, 51 bp, Homo sapiens
agctggctactctactttcaggcatcaggattgtgtttttgcaagaaggaa

SEQ ID NO: 36292 - DNA, 51 bp, Homo sapiens
gtgaatgatccctgaagacattatgcagtgaaagaggatggtgacaaaaga

SEQ ID NO: 36293 - DNA, 33 bp, Homo sapiens
ttatggaattataaaaactccttgtgtatcatg

SEQ ID NO: 36294 - DNA, 33 bp, Homo sapiens
tgcacattggtgacaaaaaaaagcaagagaagg

SEQ ID NO: 36295 - DNA, 33 bp, Homo sapiens
tcacctggtcaatgcccatcccctgcagtgaga

SEQ ID NO: 36296 - DNA, 33 bp, Homo sapiens
gatgggaaaggtgagaagcatgttagttgaaat

SEQ ID NO: 36297 - DNA, 33 bp, Homo sapiens
gaagctttacaaactacggtggtgatgtccagt

SEQ ID NO: 36298 - DNA, 33 bp, Homo sapiens
accaataagaaaggcacataacagtaagaaata

SEQ ID NO: 36299 - DNA, 33 bp, Homo sapiens
cccggctaacctcatacgttttaatcccaaatt

SEQ ID NO: 36300 - DNA, 33 bp, Homo sapiens
tttccgcggcaatcaacagtgaagatgtattta

SEQ ID NO: 36301 - DNA, 33 bp, Homo sapiens
ctgcttttttcacataagtttttcaatcaccct

SEQ ID NO: 36302 - DNA, 33 bp, Homo sapiens
aaagagaaaaatgtgcaaacgcatacaaagttg

SEQ ID NO: 36303 - DNA, 33 bp, Homo sapiens
cacccctccaattgtcaaacacattctcctaga

SEQ ID NO: 36304 - DNA, 33 bp, Homo sapiens
catagagcacttgggacgatgagatccctttca

SEQ ID NO: 36305 - DNA, 33 bp, Homo sapiens
agatgtgatactgctagggaaggcagcataatt

SEQ ID NO: 36306 - DNA, 33 bp, Homo sapiens
ccagtgaatctcattacgacttcaccatctttc

SEQ ID NO: 36307 - DNA, 51 bp, Homo sapiens
gcttctgcctgctccacgctaaagaaaatgatgtacagaactatacttaca

SEQ ID NO: 36308 - DNA, 33 bp, Homo sapiens
taataactcatatgcaaatctttcctcaaagag

SEQ ID NO: 36309 - DNA, 33 bp, Homo sapiens
atgtgtattacagggaaattagataccacaggg

SEQ ID NO: 36310 - DNA, 33 bp, Homo sapiens
ccctccaaaggaagagacaatggccagatctac

SEQ ID NO: 36311 - DNA, 33 bp, Homo sapiens
agttaccatatagaggaaaaagtcagcagtcaa

SEQ ID NO: 36312 - DNA, 33 bp, Homo sapiens
acctgaacacggacaacctgacaccctaattcc

SEQ ID NO: 36313 - DNA, 33 bp, Homo sapiens
tgtagaggcaggggacacatgggaagtctgtgt

SEQ ID NO: 36314 - DNA, 33 bp, Homo sapiens
ttggtggtaacctagtcaatcagaatctgcacg

SEQ ID NO: 36315 - DNA, 33 bp, Homo sapiens
ttaaccctgaacatagcatttggctagtcagcc

SEQ ID NO: 36316 - DNA, 33 bp, Homo sapiens
ttgaagccttggaaaccgctccgttgatgaaac

SEQ ID NO: 36317 - DNA, 33 bp, Homo sapiens
caagttctgtgctaggacctagaaatgcattca

SEQ ID NO: 36318 - DNA, 33 bp, Homo sapiens
tcattttcatcaaggaactacaggcaagattat

SEQ ID NO: 36319 - DNA, 33 bp, Homo sapiens
ttttgaggggacacaaacgttcattatatagct

SEQ ID NO: 36320 - DNA, 33 bp, Homo sapiens
atgtagaccttgatgtcaatattactgctatag

SEQ ID NO: 36321 - DNA, 33 bp, Homo sapiens
aatattttaaaatgggccagaacagtaatagaa

SEQ ID NO: 36322 - DNA, 33 bp, Homo sapiens
ataaggtggttaatcactccgtgcctcagtttt

SEQ ID NO: 36323 - DNA, 33 bp, Homo sapiens
tatgatatgcgtgccacctacaatagttctctt

SEQ ID NO: 36324 - DNA, 51 bp, Homo sapiens
agtgttaggcactgaaactacctaaatcatgagctggtcatttagtaaatg

SEQ ID NO: 36325 - DNA, 33 bp, Homo sapiens
taggtgttgcctgaagcctcttttaaaaggacc

SEQ ID NO: 36326 - DNA, 33 bp, Homo sapiens
cctattataagccgacaagcgtatacaggattt

SEQ ID NO: 36327 - DNA, 51 bp, Homo sapiens
aatacctttttatgaaaattgacaacagtgctcctgaaactttactgtaca

SEQ ID NO: 36328 - DNA, 33 bp, Homo sapiens
tttctctcttgacttgcaaaataaatactctat

SEQ ID NO: 36329 - DNA, 33 bp, Homo sapiens
tgttataaatgtgacaagaaaaactacaatcac

SEQ ID NO: 36330 - DNA, 33 bp, Homo sapiens
tttttcatgtcatttcacctcttctcaggttgt

SEQ ID NO: 36331 - DNA, 51 bp, Homo sapiens
tatttttctgctttgttttgtttagcaagcagtatctctgtaataatccct

SEQ ID NO: 36332 - DNA, 33 bp, Homo sapiens
tcatgactgctgagaacagagagtgctggccat

SEQ ID NO: 36333 - DNA, 33 bp, Homo sapiens
taagtgagaaccatccactgctgcagtctataa

SEQ ID NO: 36334 - DNA, 33 bp, Homo sapiens
cacctatatgtattcgcaatagcaccataacag

SEQ ID NO: 36335 - DNA, 33 bp, Homo sapiens
tgtatttattttttaactgcaaactcaggtctt

SEQ ID NO: 36336 - DNA, 33 bp, Homo sapiens
acatactgacaaaatgcaattgattcgtttacc

SEQ ID NO: 36337 - DNA, 33 bp, Homo sapiens
ctggcagatgtatataaaaagataatgactcat

SEQ ID NO: 36338 - DNA, 33 bp, Homo sapiens
actgagtttgaagttgaaagggactgtggacac

SEQ ID NO: 36339 - DNA, 33 bp, Homo sapiens
agaacagaatcactagacctgaagtgaaaatgt

SEQ ID NO: 36340 - DNA, 33 bp, Homo sapiens
tgttcatcttgaattgaaaacacttttaggaaa

SEQ ID NO: 36341 - DNA, 33 bp, Homo sapiens
caggcacgtcgtaaccacagacaggacactgac

SEQ ID NO: 36342 - DNA, 33 bp, Homo sapiens
gaaagaaagctattggaatgaagactattgatc

SEQ ID NO: 36343 - DNA, 33 bp, Homo sapiens
tatgcttatgacatcaacacttttatggcaatt

SEQ ID NO: 36344 - DNA, 51 bp, Homo sapiens
ccctgtgcagaggcattttgggctcaatagatccagagtgctccagtcaag

SEQ ID NO: 36345 - DNA, 33 bp, Homo sapiens
catcagaatcacatggacacttattagaaatgc

SEQ ID NO: 36346 - DNA, 33 bp, Homo sapiens
tccactgccaacaccaatgcaactactgagtga

SEQ ID NO: 36347 - DNA, 33 bp, Homo sapiens
attttattgctgactacccttccaggttaacct

SEQ ID NO: 36348 - DNA, 33 bp, Homo sapiens
ggcaaggtaactctagcaatttgagcagaagga

SEQ ID NO: 36349 - DNA, 33 bp, Homo sapiens
gatttaaaactagatacgttcttcctaatatac

SEQ ID NO: 36350 - DNA, 33 bp, Homo sapiens
aatacatacctctccacaacaccattactcatt

SEQ ID NO: 36351 - DNA, 33 bp, Homo sapiens
ttaatcattagggaaacgcaagtgaaaactgca

SEQ ID NO: 36352 - DNA, 33 bp, Homo sapiens
tcttgaacgcttcaaaggtctcttaacactttg

SEQ ID NO: 36353 - DNA, 33 bp, Homo sapiens
ctcatatcaagaacaacgtgactttgatgctat

SEQ ID NO: 36354 - DNA, 33 bp, Homo sapiens
tcatttcagtgaactcaacagtgttactgtagt

SEQ ID NO: 36355 - DNA, 33 bp, Homo sapiens
ttcagcctgcaaagtacagattactccaggcag

SEQ ID NO: 36356 - DNA, 33 bp, Homo sapiens
tcagtcatctatatccaaaatgtatctgagtta

SEQ ID NO: 36357 - DNA, 33 bp, Homo sapiens
gtgagaaaaatcagaaatatgattgctcagaag

SEQ ID NO: 36358 - DNA, 33 bp, Homo sapiens
agatccagttgctccacgttgttttgttcactg

SEQ ID NO: 36359 - DNA, 33 bp, Homo sapiens
tggtacaagctagagcggaaacttgagtaaagc

SEQ ID NO: 36360 - DNA, 33 bp, Homo sapiens
agctggattctgtaagacatttaggacattctg

SEQ ID NO: 36361 - DNA, 51 bp, Homo sapiens
gggagggttaaaagtctgactcaaaagcgcactgtcacaatagcctgggga

SEQ ID NO: 36362 - DNA, 51 bp, Homo sapiens
gtcaaatgaatgtacacattcatctcttcttatgggaattacatccaggaa

SEQ ID NO: 36363 - DNA, 33 bp, Homo sapiens
cttatatttaagataagtagcctgccacaatta

SEQ ID NO: 36364 - DNA, 33 bp, Homo sapiens
actctattagatcttgaaacagcactctcttct

SEQ ID NO: 36365 - DNA, 33 bp, Homo sapiens
tttggcatatgtgcaacgagtaaattttctgta

SEQ ID NO: 36366 - DNA, 33 bp, Homo sapiens
tcgtgtgctatattagcatttgctttatacctt

SEQ ID NO: 36367 - DNA, 33 bp, Homo sapiens
ggtttacctgacatagcatttaactttgctttt

SEQ ID NO: 36368 - DNA, 33 bp, Homo sapiens
agaatgtagaggcagacgaaatacagtgaggga

SEQ ID NO: 36369 - DNA, 33 bp, Homo sapiens
aaaaggatttaagtccaatagtaaaaggagcga

SEQ ID NO: 36370 - DNA, 33 bp, Homo sapiens
caagttaaagtcatccacagtaaaactgagaac

SEQ ID NO: 36371 - DNA, 33 bp, Homo sapiens
accttcctgagtcatacaaagtcacttgacctc

SEQ ID NO: 36372 - DNA, 33 bp, Homo sapiens
tgtcatccaacggaagcactgctaagccagaca

SEQ ID NO: 36373 - DNA, 33 bp, Homo sapiens
tgtttcctctaatgaacgggcataatactgctc

SEQ ID NO: 36374 - DNA, 33 bp, Homo sapiens
taattaaatacaaactcagcccattactttcac

SEQ ID NO: 36375 - DNA, 33 bp, Homo sapiens
aacagcctaaagatgacgtgtaagagcataata

SEQ ID NO: 36376 - DNA, 33 bp, Homo sapiens
attctatatgtgtttacggggtgtaatctctgt

SEQ ID NO: 36377 - DNA, 33 bp, Homo sapiens
atgttctaaaaattccaaagttcaactcttaga

SEQ ID NO: 36378 - DNA, 33 bp, Homo sapiens
gccacctggagtgagaataattcaagcaatctt

SEQ ID NO: 36379 - DNA, 33 bp, Homo sapiens
atttttctattggctgaatgcaagtcccaggtt

SEQ ID NO: 36380 - DNA, 33 bp, Homo sapiens
agactagaaagaaaacaggtattgccatcagat

SEQ ID NO: 36381 - DNA, 33 bp, Homo sapiens
tttcagaagcctggaaatagaactcaacacacc

SEQ ID NO: 36382 - DNA, 33 bp, Homo sapiens
tagtacattgtaggcaggtagatgtgttgagaa

SEQ ID NO: 36383 - DNA, 33 bp, Homo sapiens
gaaaaagtgattcaataataaggagaaaaatga

SEQ ID NO: 36384 - DNA, 33 bp, Homo sapiens
aaacattgcaacattcacttcttacgacctttc

SEQ ID NO: 36385 - DNA, 33 bp, Homo sapiens
aaatgcattctatagcacaggatgttccagtca

SEQ ID NO: 36386 - DNA, 33 bp, Homo sapiens
atgtcctgtttggaacaccaactctgtatcagt

SEQ ID NO: 36387 - DNA, 51 bp, Homo sapiens
tacaatcaatggcatgttataatttaattggcagcattatttgtctcttaa

SEQ ID NO: 36388 - DNA, 51 bp, Homo sapiens
tgcacttaaaatgggtgaaattataccgtggaagttatacctcaataaagt

SEQ ID NO: 36389 - DNA, 51 bp, Homo sapiens
ctcaaaacaaaggaagtgcaatttacagaaggtagtagaataggcagataa

SEQ ID NO: 36390 - DNA, 33 bp, Homo sapiens
agtgttggaaggtcaccaataatcccaaataac

SEQ ID NO: 36391 - DNA, 33 bp, Homo sapiens
gaagttgcaaaaagtacctggcatttaggaaat

SEQ ID NO: 36392 - DNA, 33 bp, Homo sapiens
attattctattaggctaaaaagaaatcaattat

SEQ ID NO: 36393 - DNA, 51 bp, Homo sapiens
tggtgactcccattcaaattcaggaccatggatttccatttaatctcccca

SEQ ID NO: 36394 - DNA, 33 bp, Homo sapiens
gtatgctatcagagtaaattttcaagctcaaac

SEQ ID NO: 36395 - DNA, 33 bp, Homo sapiens
atactttctccaaaaaaaatacagtctgtctgt

SEQ ID NO: 36396 - DNA, 33 bp, Homo sapiens
atttcctgacttattcacttctgtatcaccagc

SEQ ID NO: 36397 - DNA, 33 bp, Homo sapiens
ctgcattaaaggttgagttttccttagtgctca

SEQ ID NO: 36398 - DNA, 33 bp, Homo sapiens
ttctgcatgcatgggaaaagttagctccagtcc

SEQ ID NO: 36399 - DNA, 33 bp, Homo sapiens
ggtaagaagttcagcaaaattttaggatgcaaa

SEQ ID NO: 36400 - DNA, 33 bp, Homo sapiens
gagtgatcacaaagtgcatcttagccagtgttg

SEQ ID NO: 36401 - DNA, 33 bp, Homo sapiens
aatacagtataagtcaatcacctctccattctg

SEQ ID NO: 36402 - DNA, 51 bp, Homo sapiens
gaaattacatggttatcctttatagaacttgtcttatttacaattttacat

SEQ ID NO: 36403 - DNA, 33 bp, Homo sapiens
ggatcaggaaagccaacgctgaaaaatttaagc

SEQ ID NO: 36404 - DNA, 33 bp, Homo sapiens
aaacatatttataaaccaaaatgtagcatcacc

SEQ ID NO: 36405 - DNA, 51 bp, Homo sapiens
aatgcagcagctttggtgtcctgttgtaactttagtgaaaatactaattct

SEQ ID NO: 36406 - DNA, 51 bp, Homo sapiens
ctagtatagaatagatgtgaatctcccagtagacagtgtacagagtagggt

SEQ ID NO: 36407 - DNA, 51 bp, Homo sapiens
gagaacagtctgcaaatggacagaacaagtcaaaagagaccagcaataaga

SEQ ID NO: 36408 - DNA, 33 bp, Homo sapiens
caaatagactgtaaaaaccaggataacgtcctt

SEQ ID NO: 36409 - DNA, 33 bp, Homo sapiens
gcctgatgaggcttgaaaattaagtagaggtca

SEQ ID NO: 36410 - DNA, 33 bp, Homo sapiens
atacttaatatctctcaacctcagtttgttcat

SEQ ID NO: 36411 - DNA, 33 bp, Homo sapiens
acgtaaagcctggtgtaaatgtttctgctattt

SEQ ID NO: 36412 - DNA, 33 bp, Homo sapiens
agatagctagataatacatatacacacagctaa

SEQ ID NO: 36413 - DNA, 33 bp, Homo sapiens
tcatccaacaatacaaaaaatgtagcagggtca

SEQ ID NO: 36414 - DNA, 33 bp, Homo sapiens
agaggctgtcagtaaacgtggaactgtccacgg

SEQ ID NO: 36415 - DNA, 33 bp, Homo sapiens
ccactcacctggattacggcagccggtgagaat

SEQ ID NO: 36416 - DNA, 33 bp, Homo sapiens
aggcaagaaatgaataaagcacaagaatacaca

SEQ ID NO: 36417 - DNA, 33 bp, Homo sapiens
gagaccatgatattgactaaaacaccaaggtct

SEQ ID NO: 36418 - DNA, 33 bp, Homo sapiens
ctttcaagttctctgactactactttgtttcca

SEQ ID NO: 36419 - DNA, 33 bp, Homo sapiens
gaaaaaccctaacagaagtgtcacaattatgac

SEQ ID NO: 36420 - DNA, 33 bp, Homo sapiens
actatatagaagagtccacaaaatcgagagcaa

SEQ ID NO: 36421 - DNA, 33 bp, Homo sapiens
aattcgaatttgagaacgtctctgctatagcat

SEQ ID NO: 36422 - DNA, 33 bp, Homo sapiens
tgatagctattactaaatcctagagtggatatt

SEQ ID NO: 36423 - DNA, 33 bp, Homo sapiens
cagctaaggaggaacacggccttcttgtctcag

SEQ ID NO: 36424 - DNA, 33 bp, Homo sapiens
cttcacataagtttgacgctttccttctgatgt

SEQ ID NO: 36425 - DNA, 33 bp, Homo sapiens
aggtaaaatgtatgaccggtgccaacctacagg

SEQ ID NO: 36426 - DNA, 33 bp, Homo sapiens
aaaaatgaatgcataaaatgaagtaagagatgt

SEQ ID NO: 36427 - DNA, 33 bp, Homo sapiens
accgtgcttcgtcatactaccagaattattttt

SEQ ID NO: 36428 - DNA, 33 bp, Homo sapiens
aggcctcatctctacaatcaatcaacttgattc

SEQ ID NO: 36429 - DNA, 33 bp, Homo sapiens
tgtcaatgggcctttaaggctgtcccaaacttc

SEQ ID NO: 36430 - DNA, 33 bp, Homo sapiens
attctgtttattccaaagggagaatcgctttga

SEQ ID NO: 36431 - DNA, 33 bp, Homo sapiens
cactcaataaaggcaaactttcaaaatgaaatt

SEQ ID NO: 36432 - DNA, 33 bp, Homo sapiens
tcattagcagcatagaaccagcttagacaatct

SEQ ID NO: 36433 - DNA, 51 bp, Homo sapiens
gcctcattttgtagcacctgttgcactaattaccagaaagctccgttcagc

SEQ ID NO: 36434 - DNA, 51 bp, Homo sapiens
taatgtcatacaatatttcaactcaaatactgattttgccacaaatgagag

SEQ ID NO: 36435 - DNA, 51 bp, Homo sapiens
ccatttcttcaattgcttgaaagaactaaagagtcagacatgacaaactgc

SEQ ID NO: 36436 - DNA, 51 bp, Homo sapiens
ctctagaaatcatagaagaaacaaaagaaagctgttttcatagactggaat

SEQ ID NO: 36437 - DNA, 51 bp, Homo sapiens
caacttgaggtgagatcacatgttagcttgtatatcttccagtcttccaga

SEQ ID NO: 36438 - DNA, 33 bp, Homo sapiens
gaaggcttgacttgtaagagaaaaatacttcaa

SEQ ID NO: 36439 - DNA, 33 bp, Homo sapiens
tggctattagacttaagcaccatctaccggatc

SEQ ID NO: 36440 - DNA, 33 bp, Homo sapiens
gacatagaatttaccacctgtacatttttaaga

SEQ ID NO: 36441 - DNA, 33 bp, Homo sapiens
aacctggttggtggtgaagctcaaaataaatct

SEQ ID NO: 36442 - DNA, 33 bp, Homo sapiens
actctatcagcagtaacctctcttatgttttcc

SEQ ID NO: 36443 - DNA, 33 bp, Homo sapiens
tttttccagtactccccacttgacagcctctca

SEQ ID NO: 36444 - DNA, 33 bp, Homo sapiens
gctagtcagtgtaacaataatgatttagtggac

SEQ ID NO: 36445 - DNA, 33 bp, Homo sapiens
ctttctaattctctgaaaaaacttctaatctac

SEQ ID NO: 36446 - DNA, 33 bp, Homo sapiens
ggaaagtacatcaggggatactctaagaaattt

SEQ ID NO: 36447 - DNA, 33 bp, Homo sapiens
taaagtaatgaaataccattccacaagcatcaa

SEQ ID NO: 36448 - DNA, 33 bp, Homo sapiens
gatgtccactctcaccactccttttcagcatag

SEQ ID NO: 36449 - DNA, 33 bp, Homo sapiens
gtgggctgaaaccagaacataagagacctaaga

SEQ ID NO: 36450 - DNA, 33 bp, Homo sapiens
ccacctctccaacttacggggctcactgttacc

SEQ ID NO: 36451 - DNA, 33 bp, Homo sapiens
agtgcaccactgaaggaacatcccaagattctt

SEQ ID NO: 36452 - DNA, 33 bp, Homo sapiens
atgacagatatacaatcaaacaagctgtgatca

SEQ ID NO: 36453 - DNA, 33 bp, Homo sapiens
agaaataatcacctcacgaaaagaatggagttg

SEQ ID NO: 36454 - DNA, 33 bp, Homo sapiens
ttctcaatgactctccacaaagtctttcattat

SEQ ID NO: 36455 - DNA, 33 bp, Homo sapiens
gaattatttaaaggcacctcaagtgggatttga

SEQ ID NO: 36456 - DNA, 51 bp, Homo sapiens
cattcattgctagaatgtaactttaagaaccagaatatttcttagacttca

SEQ ID NO: 36457 - DNA, 33 bp, Homo sapiens
agaaacccagagagaaagagcacagccctttag

SEQ ID NO: 36458 - DNA, 33 bp, Homo sapiens
caatcttgtggatttcactctaactgctcatgg

SEQ ID NO: 36459 - DNA, 33 bp, Homo sapiens
aactttgagggacatacgtaaggtgttgcaaat

SEQ ID NO: 36460 - DNA, 51 bp, Homo sapiens
tatgtcttaacaattttaatcagaactcatatgacgtgaacagcatttttt

SEQ ID NO: 36461 - DNA, 51 bp, Homo sapiens
catcacccacttcgtgacaaagactaactgccctagctgcctgaagtgctg

SEQ ID NO: 36462 - DNA, 51 bp, Homo sapiens
cattatatctttctacctatcaaaacgaagagttgaaacaaattttcagaa

SEQ ID NO: 36463 - DNA, 33 bp, Homo sapiens
cacttagcatatagaggcattttagaaaaccta

SEQ ID NO: 36464 - DNA, 33 bp, Homo sapiens
tagctagagatatttacgtgactaaaccacgag

SEQ ID NO: 36465 - DNA, 33 bp, Homo sapiens
ctctgccttttgcggacagttgttattttattc

SEQ ID NO: 36466 - DNA, 33 bp, Homo sapiens
agggccaccgattactcaggcaagaattaacat

SEQ ID NO: 36467 - DNA, 33 bp, Homo sapiens
aaatgtcttaaaaatcacaaatcactgtgcaga

SEQ ID NO: 36468 - DNA, 33 bp, Homo sapiens
aagtaaataagtattaggaagactaggaactgg

SEQ ID NO: 36469 - DNA, 33 bp, Homo sapiens
tttattgaatttttaaaacaactccatggctta

SEQ ID NO: 36470 - DNA, 33 bp, Homo sapiens
ttttatgagaagttgacattactgcctatctag

SEQ ID NO: 36471 - DNA, 33 bp, Homo sapiens
gatagtcctgaagtcacatttacaagtactttg

SEQ ID NO: 36472 - DNA, 33 bp, Homo sapiens
ggcttaatgattgtcaaaacacccctcccctca

SEQ ID NO: 36473 - DNA, 33 bp, Homo sapiens
gtggggtagatagttaaatatgtttgccacctt

SEQ ID NO: 36474 - DNA, 33 bp, Homo sapiens
ttgggaccaataagtcaatctcctactgaaggt

SEQ ID NO: 36475 - DNA, 51 bp, Homo sapiens
tgacacatcctctactagtcatgataaaagtgtgtgttttcataaagcctg

SEQ ID NO: 36476 - DNA, 51 bp, Homo sapiens
tacacaaataacattaaaggatgctcaatgatattagtaactgggcaaatg

SEQ ID NO: 36477 - DNA, 33 bp, Homo sapiens
attccagctctatggacggaaatttttctggtg

SEQ ID NO: 36478 - DNA, 51 bp, Homo sapiens
ctcatagacacacatatttttgttccatggactgggcaatgtaatcttatg

SEQ ID NO: 36479 - DNA, 51 bp, Homo sapiens
aaatccttctttacttggcgaaataccttgcttcaatactaatttaaacaa

SEQ ID NO: 36480 - DNA, 33 bp, Homo sapiens
ttttatttttactggaatagttatgcttcaaac

SEQ ID NO: 36481 - DNA, 33 bp, Homo sapiens
gatcactgtgtagtagcaacattttaaccatat

SEQ ID NO: 36482 - DNA, 51 bp, Homo sapiens
tacaccccagacacagaaagtaggtctgagcagtgaaaaagcatacatttt

SEQ ID NO: 36483 - DNA, 33 bp, Homo sapiens
tttttcaggcttgagacattgctgcaaggttgc

SEQ ID NO: 36484 - DNA, 33 bp, Homo sapiens
gtctcagagtcagaggaatgatttcttgtcttt

SEQ ID NO: 36485 - DNA, 33 bp, Homo sapiens
gaaagagaacagtcaaatatgcattcatctcac

SEQ ID NO: 36486 - DNA, 33 bp, Homo sapiens
cacatgttaataattgacaactatgacaaattt

SEQ ID NO: 36487 - DNA, 33 bp, Homo sapiens
ctatttcacattccaaagtacattcaagaacaa

SEQ ID NO: 36488 - DNA, 51 bp, Homo sapiens
taaacaagcagaaaacattaccatacagtggagcgcttaaatttcaccaaa

SEQ ID NO: 36489 - DNA, 33 bp, Homo sapiens
attacagagacttgggaatttatatcattctat

SEQ ID NO: 36490 - DNA, 51 bp, Homo sapiens
atagatatctaaaggttatttgaagaccaatctggcatatagaatattctt

SEQ ID NO: 36491 - DNA, 33 bp, Homo sapiens
ggagtcttaagcaggcccttataggtgaatcac

SEQ ID NO: 36492 - DNA, 33 bp, Homo sapiens
aaatttctcctggatacctgaccattttcacta

SEQ ID NO: 36493 - DNA, 33 bp, Homo sapiens
ctgttgttcctcaaatgacaacttatctgtttt

SEQ ID NO: 36494 - DNA, 33 bp, Homo sapiens
aaaaaatcagctaaacaaaaaatctctcctaga

SEQ ID NO: 36495 - DNA, 33 bp, Homo sapiens
ttaggataataatctccatctggaatcaccaaa

SEQ ID NO: 36496 - DNA, 33 bp, Homo sapiens
cccagcactacctatacaactgtactgacatat

SEQ ID NO: 36497 - DNA, 33 bp, Homo sapiens
tggtaaacatacactacaccactgatattacca

SEQ ID NO: 36498 - DNA, 51 bp, Homo sapiens
tgcatctcgtgctcacgttccagacccatcaacaggaagaaaacaagaggc

SEQ ID NO: 36499 - DNA, 51 bp, Homo sapiens
gtaaggttcatcttcatgaagttaaactatgtctcacacttctgtccagta

SEQ ID NO: 36500 - DNA, 51 bp, Homo sapiens
ctcttgatgcgtcagtgatagcaacagtcaaacacaatctggaggaactgg

SEQ ID NO: 36501 - DNA, 33 bp, Homo sapiens
gtacagatggagggacagatgagacagctgccc

SEQ ID NO: 36502 - DNA, 33 bp, Homo sapiens
agagaatgtggaaaaaaaacagacatattttgc

SEQ ID NO: 36503 - DNA, 33 bp, Homo sapiens
tggtaacgtggatgaactgtatagtgaagtctg

SEQ ID NO: 36504 - DNA, 33 bp, Homo sapiens
ttagaggtatgacataaatgttctctttcactc

SEQ ID NO: 36505 - DNA, 33 bp, Homo sapiens
tgagaccatctggcacaaaggcttcatctgtga

SEQ ID NO: 36506 - DNA, 33 bp, Homo sapiens
acaacccataaaacagcatggaaagctccttta

SEQ ID NO: 36507 - DNA, 33 bp, Homo sapiens
acatggtcactaggaaactcttgggcctcactt

SEQ ID NO: 36508 - DNA, 33 bp, Homo sapiens
ctcttctgctgtgagaaactctaatcatgtaag

SEQ ID NO: 36509 - DNA, 51 bp, Homo sapiens
ctccatttggggaagcacacttttgcagaagcactctcttaggtggtgccc

SEQ ID NO: 36510 - DNA, 33 bp, Homo sapiens
ggctatattatttgcacccagtcctgcagcgcc

SEQ ID NO: 36511 - DNA, 33 bp, Homo sapiens
ctatggggccaaactacagcctcagctggcagg

SEQ ID NO: 36512 - DNA, 33 bp, Homo sapiens
gctcaactcttatcaaccctgaaggctttctgt

SEQ ID NO: 36513 - DNA, 33 bp, Homo sapiens
ccctgctcgcttctcaatgaaccgtgggagccc

SEQ ID NO: 36514 - DNA, 33 bp, Homo sapiens
ccatctgcctgtgctgaatggcccctgagcaaa

SEQ ID NO: 36515 - DNA, 33 bp, Homo sapiens
ccaaaatgaaaaagtaacgatgctggcagtttg

SEQ ID NO: 36516 - DNA, 33 bp, Homo sapiens
taagctgaactttttcaagacacctagaatgaa

SEQ ID NO: 36517 - DNA, 33 bp, Homo sapiens
gagccttgtttttaaacgggtctcagtgattaa

SEQ ID NO: 36518 - DNA, 33 bp, Homo sapiens
cagaccgaggagtttgcaccgaggtgagaaagg

SEQ ID NO: 36519 - DNA, 33 bp, Homo sapiens
ggaaccaggtaaatgaagactggaacagagctc

SEQ ID NO: 36520 - DNA, 33 bp, Homo sapiens
ccaaagatttatgaaccagtgcaggccaggctc

SEQ ID NO: 36521 - DNA, 51 bp, Homo sapiens
acaggcacctccatatcacatgcatcctcacatgcacaatcctagaggcac

SEQ ID NO: 36522 - DNA, 33 bp, Homo sapiens
agggaagaacaaaccacgtagacacacttagtc

SEQ ID NO: 36523 - DNA, 33 bp, Homo sapiens
taaacaggttacagaaattcggctagcactaag

SEQ ID NO: 36524 - DNA, 33 bp, Homo sapiens
gtacaggcatggataacgaatctctacatatct

SEQ ID NO: 36525 - DNA, 33 bp, Homo sapiens
tgcccggtcttaaatacagtccagcaaacagcc

SEQ ID NO: 36526 - DNA, 33 bp, Homo sapiens
gctgagcctggacataacctggtaagactagaa

SEQ ID NO: 36527 - DNA, 33 bp, Homo sapiens
ctagttactttggatacgattatagacttggtc

SEQ ID NO: 36528 - DNA, 33 bp, Homo sapiens
gagtggacgagtaacagctggagagaggtgtgg

SEQ ID NO: 36529 - DNA, 33 bp, Homo sapiens
taaagtagttcacttacgggtggaccatgcaac

SEQ ID NO: 36530 - DNA, 33 bp, Homo sapiens
aggaaatcgaacccgagattgtagaagtgactt

SEQ ID NO: 36531 - DNA, 33 bp, Homo sapiens
tgtaggaactaccaacaaactcagctccctgca

SEQ ID NO: 36532 - DNA, 33 bp, Homo sapiens
tgcacatttccacagaggtatgtttcccaagtt

SEQ ID NO: 36533 - DNA, 33 bp, Homo sapiens
gcttgacagaaatagaacaaacctaagtccgga

SEQ ID NO: 36534 - DNA, 33 bp, Homo sapiens
ctttgtcacgcattcaacctgtctctcatcaac

SEQ ID NO: 36535 - DNA, 33 bp, Homo sapiens
gccagctccggggtccaaataaaacatgtggtc

SEQ ID NO: 36536 - DNA, 33 bp, Homo sapiens
gactcaccaggggaaaaactttactggtgttga

SEQ ID NO: 36537 - DNA, 33 bp, Homo sapiens
gaactcaagagtaagacgttcttgggaatttcc

SEQ ID NO: 36538 - DNA, 33 bp, Homo sapiens
gggacaaaggaagagaaatgctgtcaaaatcat

SEQ ID NO: 36539 - DNA, 33 bp, Homo sapiens
gtcagggtttaatgaagtgggataaaccacaca

SEQ ID NO: 36540 - DNA, 33 bp, Homo sapiens
tctgcctactgttgacactgaatcctgggcagt

SEQ ID NO: 36541 - DNA, 33 bp, Homo sapiens
tacttacagtatttggcaccgttacatgctgta

SEQ ID NO: 36542 - DNA, 33 bp, Homo sapiens
tgacgatctgagcttaaaatattccgtatacta

SEQ ID NO: 36543 - DNA, 33 bp, Homo sapiens
cttcagaggaacataacggaatccatagcctct

SEQ ID NO: 36544 - DNA, 33 bp, Homo sapiens
gtgaggaatatcataagtagatcagtgttgggt

SEQ ID NO: 36545 - DNA, 33 bp, Homo sapiens
aatacaaagggataaaccattgatgtagacaag

SEQ ID NO: 36546 - DNA, 33 bp, Homo sapiens
tccgctctgtgtcttaaacctttacataagggg

SEQ ID NO: 36547 - DNA, 51 bp, Homo sapiens
cccacccaatctttgcagggctttacgactctgctccttggacacttgcca

SEQ ID NO: 36548 - DNA, 33 bp, Homo sapiens
ggaaccagaagcccagcctactctcttattgtt

SEQ ID NO: 36549 - DNA, 33 bp, Homo sapiens
cacaaatagaaaactcactgagtcctgcttgca

SEQ ID NO: 36550 - DNA, 33 bp, Homo sapiens
acctccagctttcccacgaaacttggttggacc

SEQ ID NO: 36551 - DNA, 33 bp, Homo sapiens
ctactctttcattctcgaacacagataaaatca

SEQ ID NO: 36552 - DNA, 33 bp, Homo sapiens
tattagttgccttcagaacaaagaaaaggcgag

SEQ ID NO: 36553 - DNA, 33 bp, Homo sapiens
acatacggagtcctgaacttcaaacacatgcct

SEQ ID NO: 36554 - DNA, 51 bp, Homo sapiens
aagccatgcaggcttatagtatgcaaccttatatccatcagccaaagctat

SEQ ID NO: 36555 - DNA, 33 bp, Homo sapiens
acttttccatagtaacagtgattgtgttattgg

SEQ ID NO: 36556 - DNA, 33 bp, Homo sapiens
ctggatgacatggcttgaacaggtgaactgcac

SEQ ID NO: 36557 - DNA, 33 bp, Homo sapiens
ttctttaaaaattacacagttttgccaaatcca

SEQ ID NO: 36558 - DNA, 33 bp, Homo sapiens
ggtttatccagctttacctcttttctcacacca

SEQ ID NO: 36559 - DNA, 33 bp, Homo sapiens
aaagacaacagataaaccttcattaaatctaca

SEQ ID NO: 36560 - DNA, 33 bp, Homo sapiens
cacagatgagtaacacaaaccactgatccagac

SEQ ID NO: 36561 - DNA, 33 bp, Homo sapiens
ttaacagggcatagaagtctgggtcgacggtta

SEQ ID NO: 36562 - DNA, 33 bp, Homo sapiens
aacatggtaagtgccacatacaaacatgaacag

SEQ ID NO: 36563 - DNA, 33 bp, Homo sapiens
ccccacggcgattgatcaccaaagcctatgatt

SEQ ID NO: 36564 - DNA, 33 bp, Homo sapiens
gggcattgtcagtgggaaatattcttcctgaag

SEQ ID NO: 36565 - DNA, 33 bp, Homo sapiens
gtgtgtgtaaggttacaatggcccttgtgcaag

SEQ ID NO: 36566 - DNA, 33 bp, Homo sapiens
gcaagtttgctcattccatatccaggcagctgt

SEQ ID NO: 36567 - DNA, 33 bp, Homo sapiens
cttgttttagggtcaccggattgcctgccacag

SEQ ID NO: 36568 - DNA, 33 bp, Homo sapiens
gtgctgccgtgttcctcagagcaagaaggttgt

SEQ ID NO: 36569 - DNA, 33 bp, Homo sapiens
ctgagacattagcatcgataaaacctttggtac

SEQ ID NO: 36570 - DNA, 33 bp, Homo sapiens
taatcgatcagagatgcaagcagttcaaattgt

SEQ ID NO: 36571 - DNA, 33 bp, Homo sapiens
tcacttgtctgaattacattagctttcaaatcc

SEQ ID NO: 36572 - DNA, 33 bp, Homo sapiens
ccctcttaaaatttgaagaagctataaaccctc

SEQ ID NO: 36573 - DNA, 33 bp, Homo sapiens
ccttctaccatgaacacgaagcagaagaatgaa

SEQ ID NO: 36574 - DNA, 33 bp, Homo sapiens
ggctgtcaggaagttgagttttgaatatgttca

SEQ ID NO: 36575 - DNA, 33 bp, Homo sapiens
cacactactctgtactcaaaaaacatttcaaat

SEQ ID NO: 36576 - DNA, 33 bp, Homo sapiens
tgtgtcaggctgcatcaatacatattcaataaa

SEQ ID NO: 36577 - DNA, 33 bp, Homo sapiens
acattgtggcctcaagccaagtcagtatttaat

SEQ ID NO: 36578 - DNA, 33 bp, Homo sapiens
attaaaaagtgtaaaacgccatgaagatgaaca

SEQ ID NO: 36579 - DNA, 33 bp, Homo sapiens
tgagaaaggtactgtaaattctaaacttatgcc

SEQ ID NO: 36580 - DNA, 33 bp, Homo sapiens
tgttcccaatgggatacattatgctgaaagatc

SEQ ID NO: 36581 - DNA, 33 bp, Homo sapiens
tagagtataattcttacgagtgtgagctctaaa

SEQ ID NO: 36582 - DNA, 33 bp, Homo sapiens
tttagtctgaattacaaggtttttacctaaaag

SEQ ID NO: 36583 - DNA, 33 bp, Homo sapiens
ccatattctcatcagaacatttgttttcagaag

SEQ ID NO: 36584 - DNA, 33 bp, Homo sapiens
aatctacgcttgaaaacgcctttaaactcaatg

SEQ ID NO: 36585 - DNA, 51 bp, Homo sapiens
aaacacttgagtgtattggaatggacaagattatagataagtatttggaaa

SEQ ID NO: 36586 - DNA, 33 bp, Homo sapiens
tcaaattgtcctattcgcaactctaaatatgtc

SEQ ID NO: 36587 - DNA, 33 bp, Homo sapiens
acaagtcataagaacaaacaatctgccaagaac

SEQ ID NO: 36588 - DNA, 33 bp, Homo sapiens
attattctcacagatacgttttgacctcctagc

SEQ ID NO: 36589 - DNA, 33 bp, Homo sapiens
gaatggcagacaccaaactatgatcttcaacag

SEQ ID NO: 36590 - DNA, 33 bp, Homo sapiens
tgagatgcaaagataactaagtcacagactctg

SEQ ID NO: 36591 - DNA, 33 bp, Homo sapiens
agatgaatatctggtaacacctcacagaggaga

SEQ ID NO: 36592 - DNA, 33 bp, Homo sapiens
gttagcgtctgcatacccatccacaaaatggga

SEQ ID NO: 36593 - DNA, 33 bp, Homo sapiens
tggagctgattcgatcggacaagtgttgaagct

SEQ ID NO: 36594 - DNA, 33 bp, Homo sapiens
agagatgtttcctgagaatatgttctaacctct

SEQ ID NO: 36595 - DNA, 33 bp, Homo sapiens
aagtatttaacgaaaaaggatagacatacctca

SEQ ID NO: 36596 - DNA, 33 bp, Homo sapiens
tggtgagattaccacaaatgttagccactggca

SEQ ID NO: 36597 - DNA, 33 bp, Homo sapiens
tggtatgtgggacaaacgaagcattctacccta

SEQ ID NO: 36598 - DNA, 33 bp, Homo sapiens
ttagtggcaggaactaccttagtcattttgata

SEQ ID NO: 36599 - DNA, 33 bp, Homo sapiens
taaaaagtggcagaaactgaatagaaaaccaag

SEQ ID NO: 36600 - DNA, 33 bp, Homo sapiens
ggtatctcagtaggtgacacactccaacagtca

SEQ ID NO: 36601 - DNA, 33 bp, Homo sapiens
tgctgtcacctctcaccgtgacaggtatgattt

SEQ ID NO: 36602 - DNA, 33 bp, Homo sapiens
gcttaagcaaattatgccagcctacgtgaagtg

SEQ ID NO: 36603 - DNA, 33 bp, Homo sapiens
catatgcaaattaccactctagagcagtgtttt

SEQ ID NO: 36604 - DNA, 33 bp, Homo sapiens
gcttcttttccagaaaaatatgctatgtgattc

SEQ ID NO: 36605 - DNA, 33 bp, Homo sapiens
agcactgctttacctgcatctcataatttttga

SEQ ID NO: 36606 - DNA, 33 bp, Homo sapiens
gctggacttcaaactaaaccattctggattcca

SEQ ID NO: 36607 - DNA, 33 bp, Homo sapiens
catgtcctaggaagtagcttttttctcatattt

SEQ ID NO: 36608 - DNA, 33 bp, Homo sapiens
ataatgctgctggcaactgaattttttcagtgt

SEQ ID NO: 36609 - DNA, 33 bp, Homo sapiens
ggctagtaatggtcagcaacatgtctcaaaacc

SEQ ID NO: 36610 - DNA, 33 bp, Homo sapiens
ctggctctgcaatctaactgaagctgaaaaggg

SEQ ID NO: 36611 - DNA, 33 bp, Homo sapiens
atacttcagaagctccggactaaaagcctctaa

SEQ ID NO: 36612 - DNA, 33 bp, Homo sapiens
ttcactcctttaggaacgaaatcttacctctat

SEQ ID NO: 36613 - DNA, 33 bp, Homo sapiens
gataccgcaggaaaaacgaaatgtgacacccat

SEQ ID NO: 36614 - DNA, 33 bp, Homo sapiens
cggggctggctgacaacaagtaacgaaccataa

SEQ ID NO: 36615 - DNA, 33 bp, Homo sapiens
accataagcctgctcaataccatctttttctcc

SEQ ID NO: 36616 - DNA, 33 bp, Homo sapiens
atatgctgagctaaaggcttcatatgggttatt

SEQ ID NO: 36617 - DNA, 33 bp, Homo sapiens
cataagatatagatgagtagaccagagaaggtg

SEQ ID NO: 36618 - DNA, 33 bp, Homo sapiens
cagagaaggtgactggaccaaaaggttgagatt

SEQ ID NO: 36619 - DNA, 51 bp, Homo sapiens
ggagagatctggaatttcctataaaagcaagaaagactatgaactaacgca

SEQ ID NO: 36620 - DNA, 51 bp, Homo sapiens
tctagaacatgaatactatgctcacaagtaaacctgctccaagggatactt

SEQ ID NO: 36621 - DNA, 33 bp, Homo sapiens
attcatgatttatgcactgagtattgcagtcct

SEQ ID NO: 36622 - DNA, 33 bp, Homo sapiens
cttctggccctttaacaaaaacttgatgacttg

SEQ ID NO: 36623 - DNA, 33 bp, Homo sapiens
ggataagactggaggtcaacaggactggtatca

SEQ ID NO: 36624 - DNA, 33 bp, Homo sapiens
gaggtaaatgtttttacgtcaactgaacaaaac

SEQ ID NO: 36625 - DNA, 33 bp, Homo sapiens
gaaagacaatattaaactaaggatgggcacagt

SEQ ID NO: 36626 - DNA, 33 bp, Homo sapiens
ttacctggtcaatgtccatctatcctacttgac

SEQ ID NO: 36627 - DNA, 51 bp, Homo sapiens
aaaatagagacatgacacaatattaaatttaaagccagggacttagaagca

SEQ ID NO: 36628 - DNA, 33 bp, Homo sapiens
agcaaatgcagtaatcactaagggtgcagatta

SEQ ID NO: 36629 - DNA, 33 bp, Homo sapiens
ctttctcaccattaacagagactgaaatgcaga

SEQ ID NO: 36630 - DNA, 33 bp, Homo sapiens
tgcccatacaacctcaatagctccacattactt

SEQ ID NO: 36631 - DNA, 33 bp, Homo sapiens
cactgaacatgaccaggaatattaattttgaac

SEQ ID NO: 36632 - DNA, 33 bp, Homo sapiens
gtaggttccagtcttaccttctccctcattagc

SEQ ID NO: 36633 - DNA, 33 bp, Homo sapiens
acaagaaagtgttagacaggtgttaactattgt

SEQ ID NO: 36634 - DNA, 33 bp, Homo sapiens
gcagaaagaacgcatactataatgaaggagctc

SEQ ID NO: 36635 - DNA, 33 bp, Homo sapiens
tcaaatctttatcctacagggagtgctgacatt

SEQ ID NO: 36636 - DNA, 33 bp, Homo sapiens
ctggcttttagggatgacatcaatggacttctt

SEQ ID NO: 36637 - DNA, 33 bp, Homo sapiens
gtgccccctgaagttacgcagtgtgatggacct

SEQ ID NO: 36638 - DNA, 33 bp, Homo sapiens
ctcagtctaattttacacagcaggattgctcta

SEQ ID NO: 36639 - DNA, 33 bp, Homo sapiens
agagcccatgaccacaagtttttcattccgttc

SEQ ID NO: 36640 - DNA, 33 bp, Homo sapiens
ctctgttctctggagacattctgaagttccatc

SEQ ID NO: 36641 - DNA, 33 bp, Homo sapiens
aagaccctccataatccgacttttattgaactt

SEQ ID NO: 36642 - DNA, 33 bp, Homo sapiens
caagcagagttgaaccccttaaatgatgcctct

SEQ ID NO: 36643 - DNA, 33 bp, Homo sapiens
gacttggatgaaaaaacagtccaaagaataaga

SEQ ID NO: 36644 - DNA, 33 bp, Homo sapiens
atcctcaatgtacaggaaaggaagagattggca

SEQ ID NO: 36645 - DNA, 33 bp, Homo sapiens
tcactttgagttagtacgcctctccgaggtttc

SEQ ID NO: 36646 - DNA, 33 bp, Homo sapiens
ctgctatatgatctcacagaagtaacctaatct

SEQ ID NO: 36647 - DNA, 33 bp, Homo sapiens
aattgtatttttctgaacatttgaatttagcat

SEQ ID NO: 36648 - DNA, 33 bp, Homo sapiens
cacctccactgttttcaatctcagtggagcaga

SEQ ID NO: 36649 - DNA, 51 bp, Homo sapiens
ttgagccatgttaatggaatatcctaaataagaaccccattctttttcatt

SEQ ID NO: 36650 - DNA, 33 bp, Homo sapiens
gcagtgaggttaaaacaaacgtagcatttctca

SEQ ID NO: 36651 - DNA, 33 bp, Homo sapiens
tgggcttctgatgtacagagttgtgaggaaata

SEQ ID NO: 36652 - DNA, 33 bp, Homo sapiens
gcttctgttttagcaacgggcagtctagctttc

SEQ ID NO: 36653 - DNA, 33 bp, Homo sapiens
tacaggtccagagttgcaagaagaactaggact

SEQ ID NO: 36654 - DNA, 33 bp, Homo sapiens
aggatatggcatgtatcaagtgtgagatttagg

SEQ ID NO: 36655 - DNA, 33 bp, Homo sapiens
atcattttattttgcactatgagagactaataa

SEQ ID NO: 36656 - DNA, 33 bp, Homo sapiens
tttggttcatatcagccatagagacagcaatcc

SEQ ID NO: 36657 - DNA, 33 bp, Homo sapiens
ttgagcattcgttcaagcatgtttccaagttat

SEQ ID NO: 36658 - DNA, 33 bp, Homo sapiens
tcatggcacaaagttaccagcagaatgttcaga

SEQ ID NO: 36659 - DNA, 33 bp, Homo sapiens
atcccctgtatttcacgcccctcatctgaaaac

SEQ ID NO: 36660 - DNA, 33 bp, Homo sapiens
cacataaacaatggtcgacttacttcaaactat

SEQ ID NO: 36661 - DNA, 33 bp, Homo sapiens
tttcaagtgactggaaaaatgttgataccattg

SEQ ID NO: 36662 - DNA, 33 bp, Homo sapiens
tgccctttctcgctgaccttgtttaggagcctt

SEQ ID NO: 36663 - DNA, 33 bp, Homo sapiens
gacttgtaaattagtaagtgctgagattatatc

SEQ ID NO: 36664 - DNA, 33 bp, Homo sapiens
gagggaactgttgtaacgcagataatctgttta

SEQ ID NO: 36665 - DNA, 33 bp, Homo sapiens
agtattgtagctgaaactggaagttcaaccatt

SEQ ID NO: 36666 - DNA, 51 bp, Homo sapiens
ggattcttaggcttccttcaatgacaaggatctctatgtctgacattccag

SEQ ID NO: 36667 - DNA, 33 bp, Homo sapiens
ttactaaagctgattacgctgtcatcccttcct

SEQ ID NO: 36668 - DNA, 33 bp, Homo sapiens
aataagcgagctgtggaatctagacaaaaacag

SEQ ID NO: 36669 - DNA, 51 bp, Homo sapiens
agacagacccaaatacacttattccagaagcatcgattaggtctgcccttg

SEQ ID NO: 36670 - DNA, 51 bp, Homo sapiens
acaatatggaactctgaagatttttatggcaattccaagagattctcaggc

SEQ ID NO: 36671 - DNA, 33 bp, Homo sapiens
ggtccttgacttcccacaacaccctaagtgttg

SEQ ID NO: 36672 - DNA, 33 bp, Homo sapiens
taaatctttacccaacacttggaaccacaaaat

SEQ ID NO: 36673 - DNA, 33 bp, Homo sapiens
cactctggtctgagaaatatgcctagaacaaaa

SEQ ID NO: 36674 - DNA, 33 bp, Homo sapiens
ttgcgagtcaagggaacccaggagttgctctct

SEQ ID NO: 36675 - DNA, 33 bp, Homo sapiens
tctgtccacagagtaaaggtcaattaggtagtg

SEQ ID NO: 36676 - DNA, 33 bp, Homo sapiens
tttctatttgtcagcaagttttgtcagtactta

SEQ ID NO: 36677 - DNA, 33 bp, Homo sapiens
agagcaggacccggacagtaggaatccacaggc

SEQ ID NO: 36678 - DNA, 33 bp, Homo sapiens
atgttatagatgagtaagctgatgatctgagaa

SEQ ID NO: 36679 - DNA, 51 bp, Homo sapiens
atggaacacaagacaactctctaaactgtcaccttaacgctcttctcacat

SEQ ID NO: 36680 - DNA, 33 bp, Homo sapiens
acaggacacctacatcagaacaagactgctttt

SEQ ID NO: 36681 - DNA, 33 bp, Homo sapiens
tagtcctaaaatatccaacacaatttttttgaa

SEQ ID NO: 36682 - DNA, 33 bp, Homo sapiens
cctctatgtcactttccacattttttacattgt

SEQ ID NO: 36683 - DNA, 33 bp, Homo sapiens
agagtctaggttctaacgcttcgtgtcaaaccg

SEQ ID NO: 36684 - DNA, 33 bp, Homo sapiens
cctgtttacctcttacactaactacagcccagg

SEQ ID NO: 36685 - DNA, 33 bp, Homo sapiens
gtaatgccatcttgaaacctccagtcccaattg

SEQ ID NO: 36686 - DNA, 33 bp, Homo sapiens
agagaccataattccagagcgttgtagccccac

SEQ ID NO: 36687 - DNA, 33 bp, Homo sapiens
tctccctcaagactaacgtgggatctaccagga

SEQ ID NO: 36688 - DNA, 33 bp, Homo sapiens
tcatttgaaatgtatcaaaatgtcctcacaaac

SEQ ID NO: 36689 - DNA, 33 bp, Homo sapiens
atgtctatgagccatacagcactatgagtagaa

SEQ ID NO: 36690 - DNA, 33 bp, Homo sapiens
ttaaggatcatctgtgaaccttttgaatctttt

SEQ ID NO: 36691 - DNA, 33 bp, Homo sapiens
gagttctgattcaactaaagtagagcggaacat

SEQ ID NO: 36692 - DNA, 33 bp, Homo sapiens
agcctcttgtaagaacaaaatatcacacagaaa

SEQ ID NO: 36693 - DNA, 33 bp, Homo sapiens
atagctattgtgaaaagttactgagagaattac

SEQ ID NO: 36694 - DNA, 33 bp, Homo sapiens
caactaagccctctcccatcttcattccaaaag

SEQ ID NO: 36695 - DNA, 33 bp, Homo sapiens
ggaaaaaatggcacaaagattacttgagtcctg

SEQ ID NO: 36696 - DNA, 33 bp, Homo sapiens
ctgactgcagatccacagagcataaatgattgc

SEQ ID NO: 36697 - DNA, 33 bp, Homo sapiens
atcctccctctcgaccacagggactatttggtt

SEQ ID NO: 36698 - DNA, 33 bp, Homo sapiens
tacatctgagttatcacaagagtctgagatgat

SEQ ID NO: 36699 - DNA, 33 bp, Homo sapiens
gggctgagaactttgacagtaatctgcaaatcc

SEQ ID NO: 36700 - DNA, 33 bp, Homo sapiens
aagagtaaacattactcaaggatttttacctcc

SEQ ID NO: 36701 - DNA, 33 bp, Homo sapiens
tgggtattctctgcaccctaccaccacttctgt

SEQ ID NO: 36702 - DNA, 33 bp, Homo sapiens
tttgtacaccagaagaatctaattatgttggaa

SEQ ID NO: 36703 - DNA, 33 bp, Homo sapiens
aacaataaattgcacacagagtctgtcatagga

SEQ ID NO: 36704 - DNA, 33 bp, Homo sapiens
ccatgaactttccctcgaattatgctagtcaat

SEQ ID NO: 36705 - DNA, 51 bp, Homo sapiens
agaaaaataaggacatatgctcctaaaaaaacttgtaccaaaagtttactg

SEQ ID NO: 36706 - DNA, 33 bp, Homo sapiens
cccttctgaaggaaggccaattcttagagatag

SEQ ID NO: 36707 - DNA, 33 bp, Homo sapiens
tttcatctcaaaagaacctaaagcttgtagtcc

SEQ ID NO: 36708 - DNA, 33 bp, Homo sapiens
aggggaagagtgtaaaagtaatattcttctgcg

SEQ ID NO: 36709 - DNA, 33 bp, Homo sapiens
acataggaacatgaccaacttagcaataaggga

SEQ ID NO: 36710 - DNA, 33 bp, Homo sapiens
ttcagtttttaaaaagccttccagatgaacagt

SEQ ID NO: 36711 - DNA, 51 bp, Homo sapiens
caacagtccaattcaaattagacctcacaaagcaaactactctgattaggg

SEQ ID NO: 36712 - DNA, 51 bp, Homo sapiens
gacaagcattatgccattacgattacgctaaaaatgaagtccaagcacaat

SEQ ID NO: 36713 - DNA, 33 bp, Homo sapiens
agtagtgttaaaactccgagtaaggtacttcag

SEQ ID NO: 36714 - DNA, 33 bp, Homo sapiens
gactcccagtgatagaagtgagtagcttcatac

SEQ ID NO: 36715 - DNA, 33 bp, Homo sapiens
tccttagggtcttttacggctgcctaccccttg

SEQ ID NO: 36716 - DNA, 33 bp, Homo sapiens
aaaatgcacagtgtaacatctggaaagacgtat

SEQ ID NO: 36717 - DNA, 33 bp, Homo sapiens
aagtttgtctcaatcaaatgaagagaaactgca

SEQ ID NO: 36718 - DNA, 33 bp, Homo sapiens
tatctagctgggagaacggtgaaccggcaaaca

SEQ ID NO: 36719 - DNA, 33 bp, Homo sapiens
gagatcccttatgaaggcacttttcctttcaac

SEQ ID NO: 36720 - DNA, 33 bp, Homo sapiens
tgactttccatattctaaagatgattcacccat

SEQ ID NO: 36721 - DNA, 33 bp, Homo sapiens
gtgctttgtaacactacatatttcaagaggaaa

SEQ ID NO: 36722 - DNA, 33 bp, Homo sapiens
aggcattggccaaaaactgcaaaaaatgaggtg

SEQ ID NO: 36723 - DNA, 33 bp, Homo sapiens
gctggattaggcaagaatccgggctgtgctgca

SEQ ID NO: 36724 - DNA, 33 bp, Homo sapiens
acaggaaaaagtagtcaagataccatcatgtag

SEQ ID NO: 36725 - DNA, 51 bp, Homo sapiens
atggaatctacaaagaaagctaatacaactaacaggtgaggttagcaagtt

SEQ ID NO: 36726 - DNA, 51 bp, Homo sapiens
taacattgaacccccaaagtgaccacggactgatggcctcagatcatccag

SEQ ID NO: 36727 - DNA, 33 bp, Homo sapiens
attattaaaagcaatcaatgcattatgaaaatg

SEQ ID NO: 36728 - DNA, 33 bp, Homo sapiens
ttgccttagaaatagcacataaacaagaatgta

SEQ ID NO: 36729 - DNA, 33 bp, Homo sapiens
cagtaaagattctcatcaggtgccaaattctag

SEQ ID NO: 36730 - DNA, 33 bp, Homo sapiens
ctcctctccgcgggaacaggaatggcttcttca

SEQ ID NO: 36731 - DNA, 51 bp, Homo sapiens
tgggattcagtcagatgtcagatacaagggttagtgaggagcctgccaggg

SEQ ID NO: 36732 - DNA, 51 bp, Homo sapiens
gggctacagagactccaggctggtcaatcagtgacagaaatttgagttccc

SEQ ID NO: 36733 - DNA, 33 bp, Homo sapiens
agaatacgaaggcatacatgtgtttgttctcag

SEQ ID NO: 36734 - DNA, 33 bp, Homo sapiens
gggcactgcaggggagaacagcgctcaggctgg

SEQ ID NO: 36735 - DNA, 33 bp, Homo sapiens
cacaaaggtgacttccacgcccaggagaatgtg

SEQ ID NO: 36736 - DNA, 33 bp, Homo sapiens
acaggtaataacgaaccaccaaggttaattgga

SEQ ID NO: 36737 - DNA, 33 bp, Homo sapiens
gctgaggttgcatggacattgcagtgagtccat

SEQ ID NO: 36738 - DNA, 33 bp, Homo sapiens
aatgctctgctggggtcaattctcatcataggc

SEQ ID NO: 36739 - DNA, 33 bp, Homo sapiens
tctgtgagcaggaaaccggctaaccaatcggct

SEQ ID NO: 36740 - DNA, 33 bp, Homo sapiens
gccatgccctattccaagtgtcaatgtacagtg

SEQ ID NO: 36741 - DNA, 33 bp, Homo sapiens
aaaatttcctgttgtacatttcccatacagctt

SEQ ID NO: 36742 - DNA, 33 bp, Homo sapiens
gagttatttttgttccaatggggtctcagagat

SEQ ID NO: 36743 - DNA, 33 bp, Homo sapiens
tttagctgcaatgttacaggccagaaagttcac

SEQ ID NO: 36744 - DNA, 33 bp, Homo sapiens
gtatgagagcccacaaatattttagtttatgaa

SEQ ID NO: 36745 - DNA, 33 bp, Homo sapiens
ccaggcaatgaatcccagagaatttgcctttca

SEQ ID NO: 36746 - DNA, 33 bp, Homo sapiens
tagtttctcctggtcccgaaatcattataagta

SEQ ID NO: 36747 - DNA, 33 bp, Homo sapiens
ctagtccttccagaaacgttgccaagtacagag

SEQ ID NO: 36748 - DNA, 33 bp, Homo sapiens
ttacattctcagaggacgctcacagcctagatc

SEQ ID NO: 36749 - DNA, 33 bp, Homo sapiens
tgctgtggactcctggcaaagcctgctgtccca

SEQ ID NO: 36750 - DNA, 33 bp, Homo sapiens
ttggacacttttcaatcatgactcttgaagcag

SEQ ID NO: 36751 - DNA, 33 bp, Homo sapiens
gcatcaacaaacttcaactggacaaggcacccc

SEQ ID NO: 36752 - DNA, 33 bp, Homo sapiens
gatggaagtgatttcaaaggcccaaagtgagtg

SEQ ID NO: 36753 - DNA, 33 bp, Homo sapiens
ctgcagcgaggcttcacggacactattctggca

SEQ ID NO: 36754 - DNA, 33 bp, Homo sapiens
actggttggtcagagacggcttttagggctgaa

SEQ ID NO: 36755 - DNA, 33 bp, Homo sapiens
aaacttgccttcatggccacaaaaggctcccag

SEQ ID NO: 36756 - DNA, 33 bp, Homo sapiens
gcattactctgactaacgatgaacaatgtgagc

SEQ ID NO: 36757 - DNA, 33 bp, Homo sapiens
catacaatttggagccagagtgctgctttatct

SEQ ID NO: 36758 - DNA, 33 bp, Homo sapiens
ccagtggtgaccggaaagaagcaaccttcctaa

SEQ ID NO: 36759 - DNA, 33 bp, Homo sapiens
gagtgaaaggagctagacaaaagagtatgcaga

SEQ ID NO: 36760 - DNA, 33 bp, Homo sapiens
ccaatttatttcgaatcatctgtggctgctttt

SEQ ID NO: 36761 - DNA, 33 bp, Homo sapiens
gatgtatgttgccatacgcacttttcattctct

SEQ ID NO: 36762 - DNA, 33 bp, Homo sapiens
tctgtcaggatgtgaccgctggttttaagcgat

SEQ ID NO: 36763 - DNA, 51 bp, Homo sapiens
caatacccttagttgaccagttcaaactttccctgcacttgaatgctacta

SEQ ID NO: 36764 - DNA, 33 bp, Homo sapiens
tttttttttctgccaaaatttatagctgccctg

SEQ ID NO: 36765 - DNA, 33 bp, Homo sapiens
ggtccatgcagccacactctgcaccctgatgtc

SEQ ID NO: 36766 - DNA, 33 bp, Homo sapiens
ccactggtatctgctacgaaggaaaggagaaat

SEQ ID NO: 36767 - DNA, 33 bp, Homo sapiens
gcacgctttcaaataacactcccagggcttgac

SEQ ID NO: 36768 - DNA, 33 bp, Homo sapiens
ccagataaaaggtcacaattcctggtgcctggt

SEQ ID NO: 36769 - DNA, 33 bp, Homo sapiens
caccaactgcatgcacaattggaatcgcgtttc

SEQ ID NO: 36770 - DNA, 33 bp, Homo sapiens
gaaacgtctagctcccgctcgtgtcaattgtct

SEQ ID NO: 36771 - DNA, 33 bp, Homo sapiens
gataggaacaaaaaaacctcattagagtcacaa

SEQ ID NO: 36772 - DNA, 33 bp, Homo sapiens
gtaacttactggcctcaaggataggcctctggt

SEQ ID NO: 36773 - DNA, 33 bp, Homo sapiens
ctaatctgaaatcttaaaaggacaccaacaatc

SEQ ID NO: 36774 - DNA, 33 bp, Homo sapiens
gtgtcctgaatcccaacgtctgtagcgggacat

SEQ ID NO: 36775 - DNA, 33 bp, Homo sapiens
tgaaggaacgtattatcagtcctggagaaaaca

SEQ ID NO: 36776 - DNA, 33 bp, Homo sapiens
acccagccctgttgtacctctttctgggtatgt

SEQ ID NO: 36777 - DNA, 33 bp, Homo sapiens
taagagccgggacaaactgataaatgagctgaa

SEQ ID NO: 36778 - DNA, 33 bp, Homo sapiens
ccccaagggcgtagaaaatcccagacagtgaga

SEQ ID NO: 36779 - DNA, 33 bp, Homo sapiens
acagatgtggcaaaaaaatccacttgatccaac

SEQ ID NO: 36780 - DNA, 33 bp, Homo sapiens
gtttgatatcataaaaatccaagtcagcagaac

SEQ ID NO: 36781 - DNA, 33 bp, Homo sapiens
gaatggataagcgaaccgtgaacccctatacaa

SEQ ID NO: 36782 - DNA, 33 bp, Homo sapiens
tacttcttaacaaaaaaatgtagccagaagatt

SEQ ID NO: 36783 - DNA, 33 bp, Homo sapiens
tttggagggagccacacattgacccaatgggag

SEQ ID NO: 36784 - DNA, 33 bp, Homo sapiens
agacatggactacagcagcacaatatgaaagtg

SEQ ID NO: 36785 - DNA, 33 bp, Homo sapiens
tgcataggtcttaccccagctacagggctgagg

SEQ ID NO: 36786 - DNA, 33 bp, Homo sapiens
atgttctgaccaaatacacattaaggctaactt

SEQ ID NO: 36787 - DNA, 33 bp, Homo sapiens
tattgaggaaatagccaacagaaaattcaaaga

SEQ ID NO: 36788 - DNA, 33 bp, Homo sapiens
ttggcctcgcaaagctaagctcttaattatact

SEQ ID NO: 36789 - DNA, 33 bp, Homo sapiens
catgatatttgtgaaaaatcctaacagtcacct

SEQ ID NO: 36790 - DNA, 33 bp, Homo sapiens
aaaagtaagagtggacaggggttgattttccat

SEQ ID NO: 36791 - DNA, 33 bp, Homo sapiens
ggaaaagacaaaaaacaagtggacatgataatt

SEQ ID NO: 36792 - DNA, 33 bp, Homo sapiens
aaaaatcgggttgacactgaactctcatctgca

SEQ ID NO: 36793 - DNA, 33 bp, Homo sapiens
aagagagttaacagagaatggaaatccgatggg

SEQ ID NO: 36794 - DNA, 33 bp, Homo sapiens
agggccggattctaaacgctgtaggtcaccctg

SEQ ID NO: 36795 - DNA, 51 bp, Homo sapiens
tattctatggttcggtatgttgggccctttaagaaatggattctagagcct

SEQ ID NO: 36796 - DNA, 33 bp, Homo sapiens
actaaacatgctacgacgcacaagatagcctcc

SEQ ID NO: 36797 - DNA, 33 bp, Homo sapiens
gaaatgtcctgttttaagtgactgaaaaatctt

SEQ ID NO: 36798 - DNA, 33 bp, Homo sapiens
gtggacataggctatcaaagggtttttgggata

SEQ ID NO: 36799 - DNA, 33 bp, Homo sapiens
tccaagaatcaatcacagtgatgcttcccaatt

SEQ ID NO: 36800 - DNA, 33 bp, Homo sapiens
ttggccactagcctcaaagctacgcacaaagga

SEQ ID NO: 36801 - DNA, 33 bp, Homo sapiens
atgatactggtctccaaaatgaacaattccttc

SEQ ID NO: 36802 - DNA, 33 bp, Homo sapiens
tctgaagtccacactccgaatgaatgccaggga

SEQ ID NO: 36803 - DNA, 33 bp, Homo sapiens
cttagtgttataaaacggcttagacctctgtca

SEQ ID NO: 36804 - DNA, 51 bp, Homo sapiens
actgtttcctgagtaaacattaaaaatactccatctaaaaagctagaagtt

SEQ ID NO: 36805 - DNA, 51 bp, Homo sapiens
tacttagtttcaaggtgtgggtggaatatcaactcagggaagtggcttgtg

SEQ ID NO: 36806 - DNA, 51 bp, Homo sapiens
aagaagcgcctaagcacctctatgacggactctaagaaccgagaaatgaat

SEQ ID NO: 36807 - DNA, 33 bp, Homo sapiens
caatacagccaaagaacgatcaggcctccatta

SEQ ID NO: 36808 - DNA, 33 bp, Homo sapiens
taccttagctgaatacactggttcaaaaacatt

SEQ ID NO: 36809 - DNA, 33 bp, Homo sapiens
cccattcaaagctctccgactcctaaccccctt

SEQ ID NO: 36810 - DNA, 33 bp, Homo sapiens
accagatgcatgcaagcctggcagtttacagat

SEQ ID NO: 36811 - DNA, 33 bp, Homo sapiens
ctccttccacagcagaatacatgtgaacttgtg

SEQ ID NO: 36812 - DNA, 33 bp, Homo sapiens
cacagtgtgaaattataataagagttgtagttg

SEQ ID NO: 36813 - DNA, 33 bp, Homo sapiens
cagcaccttgagtgggaacggagatacactgaa

SEQ ID NO: 36814 - DNA, 33 bp, Homo sapiens
ccccagtactcctagaatccagaatatgtaaca

SEQ ID NO: 36815 - DNA, 33 bp, Homo sapiens
tatcatggtcatgaaacaaggaagtacgccatc

SEQ ID NO: 36816 - DNA, 33 bp, Homo sapiens
attgcagataaacaacaaatattttagcataag

SEQ ID NO: 36817 - DNA, 33 bp, Homo sapiens
acccacagtgagcttcaacacgaggaaagtaac

SEQ ID NO: 36818 - DNA, 33 bp, Homo sapiens
aaggagcagaggggagccgatgtgagagacagc

SEQ ID NO: 36819 - DNA, 33 bp, Homo sapiens
atgcatgagaagttgtaaagaacaaggaatggc

SEQ ID NO: 36820 - DNA, 33 bp, Homo sapiens
gcaaattaaaggaagaccacagagagaactgga

SEQ ID NO: 36821 - DNA, 33 bp, Homo sapiens
ggtaacatattggaaaacagaatcattagaacc

SEQ ID NO: 36822 - DNA, 33 bp, Homo sapiens
ctgggtaagacctgtacagaaaatcttctctgg

SEQ ID NO: 36823 - DNA, 33 bp, Homo sapiens
aactaacacatgtgaactgaagccaagataagc

SEQ ID NO: 36824 - DNA, 33 bp, Homo sapiens
aacacaaaagagacaacgctttttactgatgag

SEQ ID NO: 36825 - DNA, 33 bp, Homo sapiens
ctacgaggcctctttacggagccgggacattta

SEQ ID NO: 36826 - DNA, 33 bp, Homo sapiens
tggacatcctgctttaaaatgatgtccctgcct

SEQ ID NO: 36827 - DNA, 33 bp, Homo sapiens
agtctcattaggaaaacctgaccaacagtgtaa

SEQ ID NO: 36828 - DNA, 33 bp, Homo sapiens
atgcttaggcaagcccggcagcgtccaatggtt

SEQ ID NO: 36829 - DNA, 33 bp, Homo sapiens
tcatttctagctttaacatttcagtgtgaaaaa

SEQ ID NO: 36830 - DNA, 33 bp, Homo sapiens
tctgcctcttttcacacctactccctctaaggc

SEQ ID NO: 36831 - DNA, 33 bp, Homo sapiens
tagagccctcatgtaaagtgccgcacattccct

SEQ ID NO: 36832 - DNA, 33 bp, Homo sapiens
aaagaattctaatgaaagccagtagttgtcaca

SEQ ID NO: 36833 - DNA, 33 bp, Homo sapiens
ttaatggactctagacaagcgtgattgtatgcc

SEQ ID NO: 36834 - DNA, 33 bp, Homo sapiens
gtaaggcagattactcagaagaactggggtaga

SEQ ID NO: 36835 - DNA, 33 bp, Homo sapiens
agcttaccccacggaaagtttacagtgcccagt

SEQ ID NO: 36836 - DNA, 33 bp, Homo sapiens
tcattaggcactttgcagagaccagatgctttg

SEQ ID NO: 36837 - DNA, 33 bp, Homo sapiens
cttggacggagcccctcagacagcaagatcacc

SEQ ID NO: 36838 - DNA, 33 bp, Homo sapiens
agccacccacccattaaatcagtggctcacagc

SEQ ID NO: 36839 - DNA, 51 bp, Homo sapiens
aaaggcaccatcatccattaccctacagtctcaaagcagcaatcatcctgt

SEQ ID NO: 36840 - DNA, 33 bp, Homo sapiens
cccttgcatgggtcaaaatagataacagaccag

SEQ ID NO: 36841 - DNA, 33 bp, Homo sapiens
cagaatacatttctctcacacttgagaccctgg

SEQ ID NO: 36842 - DNA, 51 bp, Homo sapiens
aggaaaatatgaagattactttgcaaaatattggatatgtgctgtggcaga

SEQ ID NO: 36843 - DNA, 51 bp, Homo sapiens
tgattactctggtacatagtaacaacgtggctatgtagctcctgtcaccac

SEQ ID NO: 36844 - DNA, 33 bp, Homo sapiens
tggattaacatacgaaaagcgcctgtcaactga

SEQ ID NO: 36845 - DNA, 33 bp, Homo sapiens
aattttattataagcaccaaagtcaactgctag

SEQ ID NO: 36846 - DNA, 33 bp, Homo sapiens
atcaacctgttatgcccgacactcctttctgta

SEQ ID NO: 36847 - DNA, 33 bp, Homo sapiens
ttcattctctacctgacagaacttcaccttaag

SEQ ID NO: 36848 - DNA, 33 bp, Homo sapiens
catctctccaggttgccaggtattataattcac

SEQ ID NO: 36849 - DNA, 33 bp, Homo sapiens
tgagggaatggggaaaatgagacaagaaatgga

SEQ ID NO: 36850 - DNA, 51 bp, Homo sapiens
tgttattttttttctcctactggcaaaacgttagacaatatttcaacttag

SEQ ID NO: 36851 - DNA, 33 bp, Homo sapiens
atggttataaattccaagggaacactctaaacc

SEQ ID NO: 36852 - DNA, 33 bp, Homo sapiens
tgtcatatgtatgtgactaattcaatgccttcc

SEQ ID NO: 36853 - DNA, 33 bp, Homo sapiens
gttagaattgcagatgcacactatagtttaggg

SEQ ID NO: 36854 - DNA, 33 bp, Homo sapiens
ccatggatgaggatagcatatgtaactgctcac

SEQ ID NO: 36855 - DNA, 33 bp, Homo sapiens
acccagaaaatgggaaataaaggtgagccaaat

SEQ ID NO: 36856 - DNA, 51 bp, Homo sapiens
tatagtttcacgttaatctccagatcctgttaagccactaaataccagttt

SEQ ID NO: 36857 - DNA, 33 bp, Homo sapiens
aaccagactaagcccagctttatcagttagcag

SEQ ID NO: 36858 - DNA, 33 bp, Homo sapiens
tacaaaacaattaaaaattagctaagcatggtg

SEQ ID NO: 36859 - DNA, 33 bp, Homo sapiens
aagcaattggttccacacctgagtttctgattg

SEQ ID NO: 36860 - DNA, 33 bp, Homo sapiens
cttcagtatctcttacacatgcaaataatacgc

SEQ ID NO: 36861 - DNA, 33 bp, Homo sapiens
agatttaagaagtagcagagaatttcaaatata

SEQ ID NO: 36862 - DNA, 33 bp, Homo sapiens
gcagcatccggataaacgacacctagtggttag

SEQ ID NO: 36863 - DNA, 33 bp, Homo sapiens
cagttaacaccgactactaaagctcctgtttct

SEQ ID NO: 36864 - DNA, 33 bp, Homo sapiens
gaagggttaggaattaaaaagattggtggataa

SEQ ID NO: 36865 - DNA, 33 bp, Homo sapiens
agacttacctgacatacgagacttacctccttg

SEQ ID NO: 36866 - DNA, 33 bp, Homo sapiens
tcacaaatactacaaaatttcagaattactatt

SEQ ID NO: 36867 - DNA, 33 bp, Homo sapiens
ccttgttttacaccaagttgatgcagtaatagg

SEQ ID NO: 36868 - DNA, 51 bp, Homo sapiens
cagctagtttccttccttatctaaactgtggtcaatagcaacagattattt

SEQ ID NO: 36869 - DNA, 33 bp, Homo sapiens
tcctgggctgtgcagaataaaagatgccttgat

SEQ ID NO: 36870 - DNA, 33 bp, Homo sapiens
atgctactgttgccataaagtatttttagtctg

SEQ ID NO: 36871 - DNA, 33 bp, Homo sapiens
aaagaagctaaactgacagagaaacttaaatgc

SEQ ID NO: 36872 - DNA, 33 bp, Homo sapiens
tttctttacttgaaaaatcaccattaagtcaag

SEQ ID NO: 36873 - DNA, 33 bp, Homo sapiens
gaattgaaagcttcataagttaaaagagctaca

SEQ ID NO: 36874 - DNA, 33 bp, Homo sapiens
tgctacacttgatagcacagtacgtagtcaaca

SEQ ID NO: 36875 - DNA, 33 bp, Homo sapiens
aaatggaatgatttgacggtattctagaaaact

SEQ ID NO: 36876 - DNA, 33 bp, Homo sapiens
gtgtattggttctgctaaagactttcatttgtt

SEQ ID NO: 36877 - DNA, 33 bp, Homo sapiens
tgtgtctactcctagcccccaggaaagattctg

SEQ ID NO: 36878 - DNA, 33 bp, Homo sapiens
ttctttaacttgtcaaatactgaataaactcat

SEQ ID NO: 36879 - DNA, 33 bp, Homo sapiens
tatatgtgggggatgagaaaatatctgtgtgtg

SEQ ID NO: 36880 - DNA, 33 bp, Homo sapiens
tctctggagctatagaatattgaggccaatgtg

SEQ ID NO: 36881 - DNA, 33 bp, Homo sapiens
atctaaaataacaagaaaagtcacagtaaaaat

SEQ ID NO: 36882 - DNA, 33 bp, Homo sapiens
gctatacatttgcacagatacttctttttgttc

SEQ ID NO: 36883 - DNA, 33 bp, Homo sapiens
gtgtacaagctcaaaagagactcatcactatat

SEQ ID NO: 36884 - DNA, 33 bp, Homo sapiens
ttttactccctctttaacttgtaagacagagca

SEQ ID NO: 36885 - DNA, 33 bp, Homo sapiens
gttaaagacaagcatacacacctggctattctt

SEQ ID NO: 36886 - DNA, 33 bp, Homo sapiens
tcaggttgggtttgaaatgatcctgaggagact

SEQ ID NO: 36887 - DNA, 33 bp, Homo sapiens
gacataaagtaattcacaagggctgggcaaatt

SEQ ID NO: 36888 - DNA, 33 bp, Homo sapiens
agatactttactaaagaatggaaaaacatcatc

SEQ ID NO: 36889 - DNA, 33 bp, Homo sapiens
tgtttttaggctgttcaacaaaattttctgtga

SEQ ID NO: 36890 - DNA, 33 bp, Homo sapiens
acaggactggacaccaaaaataatgtcaaggta

SEQ ID NO: 36891 - DNA, 33 bp, Homo sapiens
acagagattactctgacacatttgtcaacatgt

SEQ ID NO: 36892 - DNA, 33 bp, Homo sapiens
attaaggcagcattaacacaaaaacaatcttaa

SEQ ID NO: 36893 - DNA, 33 bp, Homo sapiens
caagggagaagggctgaattttgccttgtaaag

SEQ ID NO: 36894 - DNA, 33 bp, Homo sapiens
taagaggcttctcggaatatagatgttcaaacc

SEQ ID NO: 36895 - DNA, 33 bp, Homo sapiens
tctcagcaccctcaaaatcacctgataaatatt

SEQ ID NO: 36896 - DNA, 33 bp, Homo sapiens
gtctcttcaattaggcacagacataacacatac

SEQ ID NO: 36897 - DNA, 33 bp, Homo sapiens
ccttaactgattaaccaactttgcagcattcca

SEQ ID NO: 36898 - DNA, 33 bp, Homo sapiens
cgattactgaatagtacggtaaaagtgtgttaa

SEQ ID NO: 36899 - DNA, 33 bp, Homo sapiens
agtataagttatgcacaactggctttgtcccta

SEQ ID NO: 36900 - DNA, 33 bp, Homo sapiens
aagataaaatttgaagcctctcttatcaaagaa

SEQ ID NO: 36901 - DNA, 33 bp, Homo sapiens
tgttaatctgtttctacgaaagttcatcaacca

SEQ ID NO: 36902 - DNA, 33 bp, Homo sapiens
catatgatactggagaacttccccctttcttgc

SEQ ID NO: 36903 - DNA, 33 bp, Homo sapiens
ttacttcagaactggaccatttagttgccactg

SEQ ID NO: 36904 - DNA, 33 bp, Homo sapiens
aagccaccgcatcgagcccaatatcacatttac

SEQ ID NO: 36905 - DNA, 33 bp, Homo sapiens
cgacaaaatgagtgaacgtaaatttagtccaaa

SEQ ID NO: 36906 - DNA, 33 bp, Homo sapiens
ataatctgctcactaaatatgtcatgcttggct

SEQ ID NO: 36907 - DNA, 33 bp, Homo sapiens
catgtggcaagttatacggtattaggctagtta

SEQ ID NO: 36908 - DNA, 51 bp, Homo sapiens
cagtggagagctacttaagtggcaaaagactgagtttcctcttgtgattgt

SEQ ID NO: 36909 - DNA, 33 bp, Homo sapiens
gaactatgttggttcccagaacttaagtgtcag

SEQ ID NO: 36910 - DNA, 33 bp, Homo sapiens
tccatagagactcatcaacacatttctttcagt

SEQ ID NO: 36911 - DNA, 33 bp, Homo sapiens
ttatctaagcaatgaccggagcgacttcaaatt

SEQ ID NO: 36912 - DNA, 33 bp, Homo sapiens
cagcccctgacatgccaactcttgtgtgacata

SEQ ID NO: 36913 - DNA, 33 bp, Homo sapiens
tcctctgtcaaataggaacaacaggttttttgt

SEQ ID NO: 36914 - DNA, 33 bp, Homo sapiens
caggaagctttccatactaaaacctttgtagag

SEQ ID NO: 36915 - DNA, 33 bp, Homo sapiens
atacagcttatttatccgagtttttgtagttca

SEQ ID NO: 36916 - DNA, 33 bp, Homo sapiens
gcagttgcacaaataaacataacctaggatctg

SEQ ID NO: 36917 - DNA, 33 bp, Homo sapiens
atgataaagtaacttcaacctgacacagtaaaa

SEQ ID NO: 36918 - DNA, 33 bp, Homo sapiens
ctggaatgagaatgccacgtccaggctgtgtta

SEQ ID NO: 36919 - DNA, 33 bp, Homo sapiens
cactttcttacttaaagtcttccaatgactttc

SEQ ID NO: 36920 - DNA, 33 bp, Homo sapiens
cttctcctggcttttaggaaatctcacttgttg

SEQ ID NO: 36921 - DNA, 33 bp, Homo sapiens
gttttagtgacattccacaaagcctacctgtgt

SEQ ID NO: 36922 - DNA, 33 bp, Homo sapiens
gggtctgggatgtctcacaagtcctggaaactc

SEQ ID NO: 36923 - DNA, 33 bp, Homo sapiens
ttggtattcgcacagccctttaaagtttttaag

SEQ ID NO: 36924 - DNA, 33 bp, Homo sapiens
ctatgatattagctgggattctcaatgctcatt

SEQ ID NO: 36925 - DNA, 33 bp, Homo sapiens
agtttataaactaggaggacatactaagagctt

SEQ ID NO: 36926 - DNA, 33 bp, Homo sapiens
cacctgttatgttccaagtgtctgaggagctag

SEQ ID NO: 36927 - DNA, 33 bp, Homo sapiens
tggcctggaaagaacagctacagtatggccaca

SEQ ID NO: 36928 - DNA, 33 bp, Homo sapiens
ggtggcaggcataagcaaggcagttcctgcatt

SEQ ID NO: 36929 - DNA, 33 bp, Homo sapiens
cttctgataacccctccaatctatgtatgtgtt

SEQ ID NO: 36930 - DNA, 33 bp, Homo sapiens
aacttgcagccagtcaagaaagtcaagagaaga

SEQ ID NO: 36931 - DNA, 33 bp, Homo sapiens
ccaaaaagcccaaactcaatgaatctactgctc

SEQ ID NO: 36932 - DNA, 33 bp, Homo sapiens
ctgaggcagaggggataaatgggtagaaagtga

SEQ ID NO: 36933 - DNA, 33 bp, Homo sapiens
cagcacacttgctgcacagaggtagatttacag

SEQ ID NO: 36934 - DNA, 33 bp, Homo sapiens
tacaaaacaagactggacattggacatattttg

SEQ ID NO: 36935 - DNA, 33 bp, Homo sapiens
tattgtgaaaaatcaaatgagatgatgtaaaat

SEQ ID NO: 36936 - DNA, 33 bp, Homo sapiens
ccctaaagaactacacaagtagaaagggtatca

SEQ ID NO: 36937 - DNA, 33 bp, Homo sapiens
ggactttgtataatgcccttcactcctcccctt

SEQ ID NO: 36938 - DNA, 33 bp, Homo sapiens
ctgtaagagttcacataatagctgagtggcgag

SEQ ID NO: 36939 - DNA, 33 bp, Homo sapiens
tcacataaattaccataaagatgaaatgtcaga

SEQ ID NO: 36940 - DNA, 33 bp, Homo sapiens
gaaaaagaccagtaaaaggactctccctagagc

SEQ ID NO: 36941 - DNA, 33 bp, Homo sapiens
ttagacccttgggtgcaacagcatttatagggt

SEQ ID NO: 36942 - DNA, 33 bp, Homo sapiens
tgatgacaggtagatgacagaacggagcaaagt

SEQ ID NO: 36943 - DNA, 33 bp, Homo sapiens
gtctagagcttaggaaatatgtcacctgctctg

SEQ ID NO: 36944 - DNA, 33 bp, Homo sapiens
tgctctcctgaaatgaacacattaaaacaaaca

SEQ ID NO: 36945 - DNA, 33 bp, Homo sapiens
tgtgtatataaacacacggagaaccacctaact

SEQ ID NO: 36946 - DNA, 33 bp, Homo sapiens
tatgcgactttggataagggaagttcattgcat

SEQ ID NO: 36947 - DNA, 33 bp, Homo sapiens
gtatatgtagcccacacagtagactcacaggta

SEQ ID NO: 36948 - DNA, 33 bp, Homo sapiens
atcacttgcaaaaactaaaaaggtcaataatgc

SEQ ID NO: 36949 - DNA, 33 bp, Homo sapiens
tgttctcttcttgccacagttattgttgtaagg

SEQ ID NO: 36950 - DNA, 33 bp, Homo sapiens
atgcagagctactcaaagcatggaattctaaag

SEQ ID NO: 36951 - DNA, 33 bp, Homo sapiens
ttactcctacgaaagtaaaatggcaaaagtgta

SEQ ID NO: 36952 - DNA, 33 bp, Homo sapiens
aaagtgtacctttgaaccggagaagtcgggccg

SEQ ID NO: 36953 - DNA, 33 bp, Homo sapiens
ccaagtgcccgactagaagcaggtctgaaacag

SEQ ID NO: 36954 - DNA, 33 bp, Homo sapiens
tggctgctcagagtcacgtgtcagccttctccc

SEQ ID NO: 36955 - DNA, 51 bp, Homo sapiens
attagagcataaaaaaatgaaattacggtactgaaaagtatgatttctaaa

SEQ ID NO: 36956 - DNA, 51 bp, Homo sapiens
ccagaaagaacaagttattgacaaaagaaagggagttagaccatcgctgga

SEQ ID NO: 36957 - DNA, 33 bp, Homo sapiens
acaacaatagtaaaaagttatcactagcagatg

SEQ ID NO: 36958 - DNA, 33 bp, Homo sapiens
gattgttttattttacccacctgctcatccata

SEQ ID NO: 36959 - DNA, 33 bp, Homo sapiens
tcattttaataagtcaatcatagtccacttgta

SEQ ID NO: 36960 - DNA, 33 bp, Homo sapiens
tattgttctctgtaataatgtcaccaggcctgc

SEQ ID NO: 36961 - DNA, 33 bp, Homo sapiens
tgggattctcttttcacctggttgcaacacttc

SEQ ID NO: 36962 - DNA, 33 bp, Homo sapiens
cccctctaatgtaagccgctccccattctacca

SEQ ID NO: 36963 - DNA, 33 bp, Homo sapiens
agccagggagttctgtaaaattatcttgtgttg

SEQ ID NO: 36964 - DNA, 33 bp, Homo sapiens
attcttccaaattctacgtccttgactacctat

SEQ ID NO: 36965 - DNA, 33 bp, Homo sapiens
tttcctacattgaacaactgttatacttgtaat

SEQ ID NO: 36966 - DNA, 33 bp, Homo sapiens
gaagccataaagaaagcattgatgtgtatctaa

SEQ ID NO: 36967 - DNA, 51 bp, Homo sapiens
atgccatgagttttcctttctgtaccaagactctagcacagttctgagagg

SEQ ID NO: 36968 - DNA, 33 bp, Homo sapiens
aatttattttaaatgcaaaagtagtggcctcta

SEQ ID NO: 36969 - DNA, 33 bp, Homo sapiens
ttagggtttgtatccaatgctgcgggagggacc

SEQ ID NO: 36970 - DNA, 33 bp, Homo sapiens
ctcaggtctttgtctacgttagcaagagccttc

SEQ ID NO: 36971 - DNA, 33 bp, Homo sapiens
ttacgtagccaaattaccattctctttcttata

SEQ ID NO: 36972 - DNA, 33 bp, Homo sapiens
aaattggaagtttaagcccgagcactgtggctc

SEQ ID NO: 36973 - DNA, 33 bp, Homo sapiens
tgcctagtaaaggtcacgattgctcatctttca

SEQ ID NO: 36974 - DNA, 33 bp, Homo sapiens
atctctaagcaaagcgcaatagacctgtaatca

SEQ ID NO: 36975 - DNA, 33 bp, Homo sapiens
tctttcagtatcttgcggcaaattctgttccaa

SEQ ID NO: 36976 - DNA, 33 bp, Homo sapiens
cccctggctgatcatacgttaagttgttatagc

SEQ ID NO: 36977 - DNA, 33 bp, Homo sapiens
cagctgtaagaagaaaggaagtactgatagata

SEQ ID NO: 36978 - DNA, 33 bp, Homo sapiens
gacgtgtcctcataaacggaggggaaatctgtg

SEQ ID NO: 36979 - DNA, 33 bp, Homo sapiens
tctactcattgataaactctgaagccataggga

SEQ ID NO: 36980 - DNA, 33 bp, Homo sapiens
tgaacctcgttgatacagacctcagtcatgaat

SEQ ID NO: 36981 - DNA, 33 bp, Homo sapiens
gatgggaaaagagcccagagaaggaaagcaaca

SEQ ID NO: 36982 - DNA, 33 bp, Homo sapiens
gaaatgttagctgtgaccttatacctagtgcct

SEQ ID NO: 36983 - DNA, 33 bp, Homo sapiens
cctgctaaggaaaatacaaactgagccgggagg

SEQ ID NO: 36984 - DNA, 33 bp, Homo sapiens
ctcaggggccagagaacgttgctgtcttgccca

SEQ ID NO: 36985 - DNA, 51 bp, Homo sapiens
catctagatctaaaaacaacactcactgaggtaggaaataaaaagtaacaa

SEQ ID NO: 36986 - DNA, 51 bp, Homo sapiens
tccttaaacttctcaatgtctccatgtttctttttgttacaaggagttaac

SEQ ID NO: 36987 - DNA, 33 bp, Homo sapiens
ggcagtcctccttctccaggttacatgaggcag

SEQ ID NO: 36988 - DNA, 51 bp, Homo sapiens
gaaatgtgttggtaggtatggtctacgtgttatggtgtccagaagaggagc

SEQ ID NO: 36989 - DNA, 33 bp, Homo sapiens
ctcactggaatcccaaagactttataaaaatgc

SEQ ID NO: 36990 - DNA, 33 bp, Homo sapiens
attaactgtggcttataaattgctgcttcagcc

SEQ ID NO: 36991 - DNA, 33 bp, Homo sapiens
atgtcctaagaacttaataagcctttgttcaag

SEQ ID NO: 36992 - DNA, 51 bp, Homo sapiens
taacacgcaatattaccattttcaaactgtgttttcagaacagaattgttt

SEQ ID NO: 36993 - DNA, 33 bp, Homo sapiens
gaatatagcaagtcctaaaaagatgacagttat

SEQ ID NO: 36994 - DNA, 33 bp, Homo sapiens
tagtaaaaactacagccgataggaacccaggat

SEQ ID NO: 36995 - DNA, 33 bp, Homo sapiens
gaacgctggagctcataaaactggagttcgtgt

SEQ ID NO: 36996 - DNA, 33 bp, Homo sapiens
tcccagatgtgtgggtcaaatcgtcactgacac

SEQ ID NO: 36997 - DNA, 33 bp, Homo sapiens
agagcttagattgtgacaggttgagaagcttcc

SEQ ID NO: 36998 - DNA, 33 bp, Homo sapiens
agtgatacctaaacccaaaggatgagtagaaat

SEQ ID NO: 36999 - DNA, 33 bp, Homo sapiens
aagaggtgagggagggccaccacatactaattt

SEQ ID NO: 37000 - DNA, 33 bp, Homo sapiens
ggaaggagccaatagacggttggaggcagaaac

SEQ ID NO: 37001 - DNA, 33 bp, Homo sapiens
aatagggaaagagaaacggttgtgaaagatgga

SEQ ID NO: 37002 - DNA, 33 bp, Homo sapiens
aacatctcgctttcaacggcaaattataggcga

SEQ ID NO: 37003 - DNA, 33 bp, Homo sapiens
attctgattatgtttacgatcctcaaaaggctt

SEQ ID NO: 37004 - DNA, 33 bp, Homo sapiens
gaaacctagtaaaattgaatggaagcatgaaga

SEQ ID NO: 37005 - DNA, 33 bp, Homo sapiens
aaagtatcatcagtcagcagtgttaactggact

SEQ ID NO: 37006 - DNA, 33 bp, Homo sapiens
attcatttaatttgtacagcaacaccatgaatt

SEQ ID NO: 37007 - DNA, 33 bp, Homo sapiens
aggccgtcactggagcaagttcacagagcagta

SEQ ID NO: 37008 - DNA, 33 bp, Homo sapiens
cttgcaaattcacttacgttaggaaatcagttg

SEQ ID NO: 37009 - DNA, 33 bp, Homo sapiens
cacacaatgaaaggtaaatttttgagccttctc

SEQ ID NO: 37010 - DNA, 33 bp, Homo sapiens
ctttgcattttgcatacggaaaaactgatctta

SEQ ID NO: 37011 - DNA, 33 bp, Homo sapiens
ttgacttgatattcacacattctccctagctgt

SEQ ID NO: 37012 - DNA, 33 bp, Homo sapiens
gtaatagcattttgagaaagttagaatatcgca

SEQ ID NO: 37013 - DNA, 33 bp, Homo sapiens
aaagcctcaccacaggacagaatggaaaccgtc

SEQ ID NO: 37014 - DNA, 33 bp, Homo sapiens
tcagcattggctcaaactgggctaagacattta

SEQ ID NO: 37015 - DNA, 51 bp, Homo sapiens
gtgagtgaaacaataacatggaatcagaaacctttggcccagatttcgttt

SEQ ID NO: 37016 - DNA, 51 bp, Homo sapiens
acccattgttgatcttcaggtttagcccatgttctactgttaactgctgcg

SEQ ID NO: 37017 - DNA, 51 bp, Homo sapiens
gatgtgcatgaatactgggagataacattgttggtagtaaaactaagggct

SEQ ID NO: 37018 - DNA, 33 bp, Homo sapiens
gcagtacttatcacaccgtggcatgtgtttagc

SEQ ID NO: 37019 - DNA, 51 bp, Homo sapiens
tgcacactctgaaagaattgtagacgcagttcagaagggactttattcttg

SEQ ID NO: 37020 - DNA, 33 bp, Homo sapiens
gagatacaatgatagacggaagttgaaccaatt

SEQ ID NO: 37021 - DNA, 33 bp, Homo sapiens
gggcatagcaaaaaagccataaacagaggaagc

SEQ ID NO: 37022 - DNA, 33 bp, Homo sapiens
atggataaggtaatcaatgagttgtcaatgtac

SEQ ID NO: 37023 - DNA, 33 bp, Homo sapiens
tatttgattattcttaacaattcacacttctca

SEQ ID NO: 37024 - DNA, 33 bp, Homo sapiens
catgaatgctgtcagaacctttgtttttcctca

SEQ ID NO: 37025 - DNA, 33 bp, Homo sapiens
gaggcaaaagtgaaagccagattatggtgagct

SEQ ID NO: 37026 - DNA, 51 bp, Homo sapiens
aggtactatctcatctaatccttacccaaagcacaagggggaatagctgac

SEQ ID NO: 37027 - DNA, 33 bp, Homo sapiens
ttaccagagatcaagaactcactttcaatttca

SEQ ID NO: 37028 - DNA, 33 bp, Homo sapiens
atttacaaagagaaaactagttcacctgaatga

SEQ ID NO: 37029 - DNA, 33 bp, Homo sapiens
attgatcgcagaaagcgcaatagattgtgaaga

SEQ ID NO: 37030 - DNA, 33 bp, Homo sapiens
attacacaactggtaaagtagcaataaagaaat

SEQ ID NO: 37031 - DNA, 33 bp, Homo sapiens
gaggcaataggcagaaccacagaaggcagtcag

SEQ ID NO: 37032 - DNA, 51 bp, Homo sapiens
tgtctgctttcttgttcattcaataatgcctgtttttgaccactccatcac

SEQ ID NO: 37033 - DNA, 33 bp, Homo sapiens
tctttagacactccaaacttgtcatgggaaatt

SEQ ID NO: 37034 - DNA, 33 bp, Homo sapiens
tacacacagatgggaacgaaggtatagaggact

SEQ ID NO: 37035 - DNA, 33 bp, Homo sapiens
aaatactgcaaagttaagaatctgagcaatacg

SEQ ID NO: 37036 - DNA, 33 bp, Homo sapiens
gtgtgtctgtgagagaaagtttgtatatgtgtc

SEQ ID NO: 37037 - DNA, 33 bp, Homo sapiens
tagaggtaggtagaggccaggtggagagagata

SEQ ID NO: 37038 - DNA, 33 bp, Homo sapiens
ctaccctcaaccttgacgagcaaaccctgcctt

SEQ ID NO: 37039 - DNA, 33 bp, Homo sapiens
gtctggcgttccaccagtagcaggtcactcaat

SEQ ID NO: 37040 - DNA, 33 bp, Homo sapiens
ttccttgtccacgttcacccagctagatcaaat

SEQ ID NO: 37041 - DNA, 33 bp, Homo sapiens
aaaggaaaacaaaacaaagcatagaatggaatc

SEQ ID NO: 37042 - DNA, 33 bp, Homo sapiens
tgcaatgactaacctagcccaagacaatagaga

SEQ ID NO: 37043 - DNA, 33 bp, Homo sapiens
atgccttcagctggtggataaaggaatggcaat

SEQ ID NO: 37044 - DNA, 33 bp, Homo sapiens
attttcctgaacactacggaaggagggccgatt

SEQ ID NO: 37045 - DNA, 33 bp, Homo sapiens
aggacttgttcaaaaacgtattcctggcctgct

SEQ ID NO: 37046 - DNA, 33 bp, Homo sapiens
gaaatgatgtccaagacgggatatgaagggtta

SEQ ID NO: 37047 - DNA, 33 bp, Homo sapiens
gaaaacaacatgaaaacacagttaggattaaga

SEQ ID NO: 37048 - DNA, 33 bp, Homo sapiens
caagtcaaagtcctacaaaatgaccagcacatt

SEQ ID NO: 37049 - DNA, 33 bp, Homo sapiens
agtcctgcctgagcgacagataatgcaaagagc

SEQ ID NO: 37050 - DNA, 33 bp, Homo sapiens
aacaagaaagctgtgaaagtttttgactcaaag

SEQ ID NO: 37051 - DNA, 33 bp, Homo sapiens
cagttaattccagatggatgttgttaccagtgt

SEQ ID NO: 37052 - DNA, 33 bp, Homo sapiens
gcctaacgtatcctgcagacccaagttagaagc

SEQ ID NO: 37053 - DNA, 33 bp, Homo sapiens
accttctcaaggtcacaaagtgcatccggtata

SEQ ID NO: 37054 - DNA, 33 bp, Homo sapiens
cattccaggaactgtcaaaagggcaatgtgatt

SEQ ID NO: 37055 - DNA, 33 bp, Homo sapiens
attaaatttgaagaccacaatgaagagagaaat

SEQ ID NO: 37056 - DNA, 33 bp, Homo sapiens
tgctcaaaagaaggcaatcaaatcttctggtaa

SEQ ID NO: 37057 - DNA, 33 bp, Homo sapiens
gcttttcacatattgcaccctggaaaatggtcc

SEQ ID NO: 37058 - DNA, 33 bp, Homo sapiens
gagtatgaaaagtgagaataattgtgggaggca

SEQ ID NO: 37059 - DNA, 33 bp, Homo sapiens
tccttaaaagtgaagaaggaggcggaagagaag

SEQ ID NO: 37060 - DNA, 33 bp, Homo sapiens
atccctattcataatcccaacctgcccctgtgt

SEQ ID NO: 37061 - DNA, 33 bp, Homo sapiens
tcaaagtgctttcaaaaacatagtttggtcagt

SEQ ID NO: 37062 - DNA, 33 bp, Homo sapiens
tggtcagaccacacaaccctgagcagtttggga

SEQ ID NO: 37063 - DNA, 33 bp, Homo sapiens
ttgtcaaaacaatccaaatctatttcaacagct

SEQ ID NO: 37064 - DNA, 33 bp, Homo sapiens
caccactggcctatgaaaaccttacagttcatc

SEQ ID NO: 37065 - DNA, 33 bp, Homo sapiens
cttttcgggtgcagggacacgttttgactttct

SEQ ID NO: 37066 - DNA, 33 bp, Homo sapiens
aataatgtatgctacaacacaaagcatttatat

SEQ ID NO: 37067 - DNA, 33 bp, Homo sapiens
ccacctcctgagcttacagaccattggaactcg

SEQ ID NO: 37068 - DNA, 33 bp, Homo sapiens
gcttttggaggatggaaggagattgtaaattga

SEQ ID NO: 37069 - DNA, 33 bp, Homo sapiens
cagtgtcatataaggaacccgttcaaaaccacc

SEQ ID NO: 37070 - DNA, 33 bp, Homo sapiens
aaagtgctattaacccaatgataaagattatga

SEQ ID NO: 37071 - DNA, 33 bp, Homo sapiens
catggtcagaagagggacatttcctctacttca

SEQ ID NO: 37072 - DNA, 33 bp, Homo sapiens
tctgaaaggtgttgaacgtaattaacttgtccc

SEQ ID NO: 37073 - DNA, 33 bp, Homo sapiens
atatcagataagggacaatgacgctgaggtggc

SEQ ID NO: 37074 - DNA, 33 bp, Homo sapiens
cattcttatagactagaaggagcataggacaag

SEQ ID NO: 37075 - DNA, 33 bp, Homo sapiens
ctttgtaaattccacacgaaaaagttcaaaagc

SEQ ID NO: 37076 - DNA, 33 bp, Homo sapiens
tcacccctccctggtaacacagtcaccattgtc

SEQ ID NO: 37077 - DNA, 33 bp, Homo sapiens
gcttgttttagttttcactactagctgtgtgac

SEQ ID NO: 37078 - DNA, 33 bp, Homo sapiens
tgactcctgtcttacaccgtcaacctctccggc

SEQ ID NO: 37079 - DNA, 33 bp, Homo sapiens
actgatgattttctccaagaagctctccttttc

SEQ ID NO: 37080 - DNA, 33 bp, Homo sapiens
acccagactcctgaccagcaaaaaccgcgagat

SEQ ID NO: 37081 - DNA, 51 bp, Homo sapiens
ataaaaatcacttgagcagtttgttcaaaacccgtgttctgatttggcata

SEQ ID NO: 37082 - DNA, 33 bp, Homo sapiens
ttcaaaagctattcagaaccgtggcaaccgcta

SEQ ID NO: 37083 - DNA, 33 bp, Homo sapiens
gagacccacaggcccaatcatgagaggctagtg

SEQ ID NO: 37084 - DNA, 33 bp, Homo sapiens
cgatgccacattcccaatggaagaagatgctaa

SEQ ID NO: 37085 - DNA, 33 bp, Homo sapiens
aagactgtgaaaggtacgattccagaaaagaag

SEQ ID NO: 37086 - DNA, 33 bp, Homo sapiens
aatgtcgtctgcccagcaatgcagagtgtagat

SEQ ID NO: 37087 - DNA, 33 bp, Homo sapiens
tttgaaacgaagtctccctctactgccgaggct

SEQ ID NO: 37088 - DNA, 33 bp, Homo sapiens
gtgagagtctgtttcaaataaagaagtgccagg

SEQ ID NO: 37089 - DNA, 33 bp, Homo sapiens
ccaatgtcaaactacaggatagccgcctccaga

SEQ ID NO: 37090 - DNA, 33 bp, Homo sapiens
ttccttgtgggcttcacgtcctactttacagag

SEQ ID NO: 37091 - DNA, 33 bp, Homo sapiens
gggagatgccagtgaacgggtctgccagggatc

SEQ ID NO: 37092 - DNA, 33 bp, Homo sapiens
atttaaagaaatgcaacatgaattcacacacac

SEQ ID NO: 37093 - DNA, 33 bp, Homo sapiens
atgtttaattctgttacggcacctgctccttag

SEQ ID NO: 37094 - DNA, 33 bp, Homo sapiens
tttgttaaggaaactacgaattccctgacaaaa

SEQ ID NO: 37095 - DNA, 33 bp, Homo sapiens
acatacgaagtaggaaataagcagaaagatttc

SEQ ID NO: 37096 - DNA, 33 bp, Homo sapiens
agatgtcagttttcccacatgactgatgtcact

SEQ ID NO: 37097 - DNA, 33 bp, Homo sapiens
ctgagacgtacgctcacacatcatgcatgagaa

SEQ ID NO: 37098 - DNA, 33 bp, Homo sapiens
atgaaatgaacagtccaactggcctacttgctc

SEQ ID NO: 37099 - DNA, 33 bp, Homo sapiens
atgtaagcagaaactacgtcttcatccccactc

SEQ ID NO: 37100 - DNA, 33 bp, Homo sapiens
tgagtctggcaaccatcaaggtactgggccctc

SEQ ID NO: 37101 - DNA, 33 bp, Homo sapiens
ctgcctggtctcactaaggccatccgaggtggg

SEQ ID NO: 37102 - DNA, 33 bp, Homo sapiens
gactgctttgagagagaaggattaggatgctgg

SEQ ID NO: 37103 - DNA, 33 bp, Homo sapiens
cccacgaatctccacaccagcaatggcaagact

SEQ ID NO: 37104 - DNA, 33 bp, Homo sapiens
gtttcaacctctgtcaccagggaattactcaaa

SEQ ID NO: 37105 - DNA, 33 bp, Homo sapiens
aaacacgtgagaggaaacacaggccgggtgtga

SEQ ID NO: 37106 - DNA, 33 bp, Homo sapiens
tccaggctccaagctcactattggcaggcactg

SEQ ID NO: 37107 - DNA, 51 bp, Homo sapiens
taaaaataaaagaccaagaacacataagctggaatgattaatatgttaaac

SEQ ID NO: 37108 - DNA, 33 bp, Homo sapiens
agggtgtgggtagtaaactgcaggaaactgaca

SEQ ID NO: 37109 - DNA, 33 bp, Homo sapiens
catagtaggtgctcaacgaactcagattgaact

SEQ ID NO: 37110 - DNA, 33 bp, Homo sapiens
ggacctcatgctaagacgcgcaacaaaattagg

SEQ ID NO: 37111 - DNA, 33 bp, Homo sapiens
ttctatccaggatccaaaagtttctcctgatgg

SEQ ID NO: 37112 - DNA, 33 bp, Homo sapiens
catcctcctcacgtaactctctacggaaaagcc

SEQ ID NO: 37113 - DNA, 33 bp, Homo sapiens
aaggtgttcagacccaaggtactgcatctcttc

SEQ ID NO: 37114 - DNA, 33 bp, Homo sapiens
gcgtcttcgtacatcaatctctgtgcacagcgg

SEQ ID NO: 37115 - DNA, 33 bp, Homo sapiens
ttgaggccacctgtggaaatggaagactgtgga

SEQ ID NO: 37116 - DNA, 33 bp, Homo sapiens
gatccaacagacaccccccaagatttaatattt

SEQ ID NO: 37117 - DNA, 33 bp, Homo sapiens
ttgacttctatagttaagttggcatttttataa

SEQ ID NO: 37118 - DNA, 33 bp, Homo sapiens
tgaaaggtatctattacagtcctactggtgttt

SEQ ID NO: 37119 - DNA, 33 bp, Homo sapiens
ggtgagtggaggaaaacctaggtcgtggaaatg

SEQ ID NO: 37120 - DNA, 33 bp, Homo sapiens
cttaagttgtgaggcactcggtacatagattga

SEQ ID NO: 37121 - DNA, 33 bp, Homo sapiens
gtatctccattgcttgcatctggtattgttatc

SEQ ID NO: 37122 - DNA, 33 bp, Homo sapiens
agtggagaagccaatacgcaaacccaagtccac

SEQ ID NO: 37123 - DNA, 33 bp, Homo sapiens
agctacgacagattgaatagagctggcatccaa

SEQ ID NO: 37124 - DNA, 33 bp, Homo sapiens
aaataaaaattaaaagaattcagcctgcccagt

SEQ ID NO: 37125 - DNA, 33 bp, Homo sapiens
gttgtggtatcttttcaaatcaaccctaagcaa

SEQ ID NO: 37126 - DNA, 33 bp, Homo sapiens
tgttccccttgtacacagagatacggacaatag

SEQ ID NO: 37127 - DNA, 51 bp, Homo sapiens
acctgccagaggaaaaaggctctagctattattaacagcagttgtactatg

SEQ ID NO: 37128 - DNA, 33 bp, Homo sapiens
ggagtgagcagcatccaaccgccgcctctgaca

SEQ ID NO: 37129 - DNA, 51 bp, Homo sapiens
cctcagttatagactacatgcatcactattgagtactgattattaagctat

SEQ ID NO: 37130 - DNA, 33 bp, Homo sapiens
tgtgtgtgtgccttcaaaggtcctcaggtcagg

SEQ ID NO: 37131 - DNA, 33 bp, Homo sapiens
gaatgagccagagttcaaatgcaagatgaaacg

SEQ ID NO: 37132 - DNA, 33 bp, Homo sapiens
ggtggtattttgtgcccctcaccagctttccct

SEQ ID NO: 37133 - DNA, 33 bp, Homo sapiens
tccagtcaaccactacagagaggaaaaacattc

SEQ ID NO: 37134 - DNA, 33 bp, Homo sapiens
catgtcagactgtccacgtgcaaattctggatt

SEQ ID NO: 37135 - DNA, 33 bp, Homo sapiens
cctaaatttccctacacgtcagacttcccagtt

SEQ ID NO: 37136 - DNA, 33 bp, Homo sapiens
catgtaccatcatacagagctatttttttgtat

SEQ ID NO: 37137 - DNA, 33 bp, Homo sapiens
gctgcctcctacttcacgagctggcatttagca

SEQ ID NO: 37138 - DNA, 33 bp, Homo sapiens
gggaaaagcgcttccaaaaaagttgagcctgtc

SEQ ID NO: 37139 - DNA, 33 bp, Homo sapiens
cttattttaagatctcacaatgccagcaacggc

SEQ ID NO: 37140 - DNA, 33 bp, Homo sapiens
gtgtggacttttagaaatgatactgctctgggt

SEQ ID NO: 37141 - DNA, 33 bp, Homo sapiens
cgtgggtataaccggacgaaacctgtgtgtgca

SEQ ID NO: 37142 - DNA, 33 bp, Homo sapiens
actctctccagttctaagactcctctctacatc

SEQ ID NO: 37143 - DNA, 33 bp, Homo sapiens
aggtagctgccctggcatatttaacaacatcag

SEQ ID NO: 37144 - DNA, 33 bp, Homo sapiens
gggtaagactgagcgaaggagataaaggaaatt

SEQ ID NO: 37145 - DNA, 33 bp, Homo sapiens
aaatccaacactgtcacgataagagcactcaat

SEQ ID NO: 37146 - DNA, 33 bp, Homo sapiens
gaccctgtaacggccaacgttgcagtctgaggt

SEQ ID NO: 37147 - DNA, 33 bp, Homo sapiens
aaggtgtggataagggaactactgtacgtgact

SEQ ID NO: 37148 - DNA, 33 bp, Homo sapiens
ccaagtttgggaaaccagcaaggtgagtattgg

SEQ ID NO: 37149 - DNA, 33 bp, Homo sapiens
gcctcttcttataataaggacaccagtcacatt

SEQ ID NO: 37150 - DNA, 33 bp, Homo sapiens
gttgtatctgtgaaaagttaaagtattcacact

SEQ ID NO: 37151 - DNA, 33 bp, Homo sapiens
ttatgttttaacgagacaagatcagcttgtgta

SEQ ID NO: 37152 - DNA, 33 bp, Homo sapiens
cactcccctcctgtaacgtgctgagctctgacc

SEQ ID NO: 37153 - DNA, 33 bp, Homo sapiens
agatttccagttcccccctgagttctggcccat

SEQ ID NO: 37154 - DNA, 33 bp, Homo sapiens
taaacctcctttaccacacaaactcgagtgtct

SEQ ID NO: 37155 - DNA, 33 bp, Homo sapiens
agagctggggttcgaaactagcatttcaggcac

SEQ ID NO: 37156 - DNA, 33 bp, Homo sapiens
cctttggacaaaccttcaaaatctgtctctgga

SEQ ID NO: 37157 - DNA, 33 bp, Homo sapiens
gcagccatgtggtggaaggggatggaactcagt

SEQ ID NO: 37158 - DNA, 33 bp, Homo sapiens
ccctgttgtaaggacccgattaattacactgga

SEQ ID NO: 37159 - DNA, 33 bp, Homo sapiens
ttgttgatatgtgaaacgtggtctgtgatgtcc

SEQ ID NO: 37160 - DNA, 33 bp, Homo sapiens
gtgactcccagaggtactaaggaaaggagaaag

SEQ ID NO: 37161 - DNA, 33 bp, Homo sapiens
ggcacctgcccaattcacctggcagattcaggc

SEQ ID NO: 37162 - DNA, 33 bp, Homo sapiens
cggccatgtgctacacactacgcaaggctcctc

SEQ ID NO: 37163 - DNA, 33 bp, Homo sapiens
gagattgtaggctttccatcacgttgttattga

SEQ ID NO: 37164 - DNA, 33 bp, Homo sapiens
gacacgtaacatggccagaagttatcggcagaa

SEQ ID NO: 37165 - DNA, 33 bp, Homo sapiens
cacaggctacttcatccagaccagaaaggactc

SEQ ID NO: 37166 - DNA, 33 bp, Homo sapiens
atgcactgtggcctcacgcttcagccattcact

SEQ ID NO: 37167 - DNA, 33 bp, Homo sapiens
aagtcgtgccagtagccgagcaaagctggtatt

SEQ ID NO: 37168 - DNA, 33 bp, Homo sapiens
gcctttccaagactcacagaacgtgcggtagag

SEQ ID NO: 37169 - DNA, 33 bp, Homo sapiens
tgccccgttagatcaaccagatgcactccagag

SEQ ID NO: 37170 - DNA, 33 bp, Homo sapiens
catttttatcctcagaaatgaccatactcatta

SEQ ID NO: 37171 - DNA, 33 bp, Homo sapiens
tcaaaaggccagaaaaatccaggagtcaggaag

SEQ ID NO: 37172 - DNA, 33 bp, Homo sapiens
gctgaaaccgcagctgaaaaagaaatcatgttt

SEQ ID NO: 37173 - DNA, 33 bp, Homo sapiens
agaggtggcgacaacacgaagcccattggtgga

SEQ ID NO: 37174 - DNA, 33 bp, Homo sapiens
cttactgaggtcatcaatcagctattttcaaat

SEQ ID NO: 37175 - DNA, 33 bp, Homo sapiens
acccctgcacaactcagctgatggaaccaagtg

SEQ ID NO: 37176 - DNA, 33 bp, Homo sapiens
tggccatccaagttcgaaggcgacgtggtaggg

SEQ ID NO: 37177 - DNA, 33 bp, Homo sapiens
tgcaggggaacgataacgccccagacatgggtt

SEQ ID NO: 37178 - DNA, 33 bp, Homo sapiens
caggccttgggtaatcacatcactattttggat

SEQ ID NO: 37179 - DNA, 33 bp, Homo sapiens
gtgatgcagttaaccccatcttctactagtgtc

SEQ ID NO: 37180 - DNA, 33 bp, Homo sapiens
aagttaagcataaaatcactgtacgacccagca

SEQ ID NO: 37181 - DNA, 51 bp, Homo sapiens
acatataaatatctgatgaataggacacaaaatgtgaaatcatctgagtaa

SEQ ID NO: 37182 - DNA, 33 bp, Homo sapiens
ctctgaatcagaaaccgggaaagaaaaagaatg

SEQ ID NO: 37183 - DNA, 51 bp, Homo sapiens
ctgctgtgaatctattacctgtaaccggtccttgtctcctctaagcctgtt

SEQ ID NO: 37184 - DNA, 33 bp, Homo sapiens
tggcagcaaaatgccaatctttccatcaagatg

SEQ ID NO: 37185 - DNA, 33 bp, Homo sapiens
agcagatcaagcagcacatcagcttgcacgaag

SEQ ID NO: 37186 - DNA, 33 bp, Homo sapiens
ttcacattatctttaaacatatgtctgtggctt

SEQ ID NO: 37187 - DNA, 33 bp, Homo sapiens
tcatttcataaattcccgaagacagtgaaaggc

SEQ ID NO: 37188 - DNA, 33 bp, Homo sapiens
aagctatgtggctttacagatcataaaaccagt

SEQ ID NO: 37189 - DNA, 33 bp, Homo sapiens
gaattttgtgtatgcacgtatcttaattaacac

SEQ ID NO: 37190 - DNA, 33 bp, Homo sapiens
ccaaagaagcttcaccaaatttagcacatatat

SEQ ID NO: 37191 - DNA, 33 bp, Homo sapiens
gtgtcttgactgaaaaatgaaacgaatgattta

SEQ ID NO: 37192 - DNA, 33 bp, Homo sapiens
atccatttcacacagcaacatagagagagttct

SEQ ID NO: 37193 - DNA, 33 bp, Homo sapiens
cttacctgtgagcttaaggaacaggagttaatt

SEQ ID NO: 37194 - DNA, 33 bp, Homo sapiens
gagtgaagcaaattacaaaagcacacagcatgc

SEQ ID NO: 37195 - DNA, 33 bp, Homo sapiens
ccaatggagcaagtacaaacatttactgccgat

SEQ ID NO: 37196 - DNA, 33 bp, Homo sapiens
gcaacgagatctctgacagtaatgggtaaccct

SEQ ID NO: 37197 - DNA, 33 bp, Homo sapiens
gagttactggtttgcactgaacagcctggtgga

SEQ ID NO: 37198 - DNA, 33 bp, Homo sapiens
tgtttgatatgaaagaagagatttttaaccaga

SEQ ID NO: 37199 - DNA, 33 bp, Homo sapiens
tgcacagaaggaaagcaaagggtgcatgcggct

SEQ ID NO: 37200 - DNA, 51 bp, Homo sapiens
cgtagatggtgattctaaggagaacacttgtctctttttatattaatctcc

SEQ ID NO: 37201 - DNA, 33 bp, Homo sapiens
agccactaggaaccgacgtagaaattatagaaa

SEQ ID NO: 37202 - DNA, 33 bp, Homo sapiens
gattcttgaaatacagaagactgattattaagg

SEQ ID NO: 37203 - DNA, 33 bp, Homo sapiens
tgtttctatctttcacaaagcttacataattct

SEQ ID NO: 37204 - DNA, 33 bp, Homo sapiens
tttaattgtattgataagaaatctgaggagaaa

SEQ ID NO: 37205 - DNA, 33 bp, Homo sapiens
actgctgaaaaaactaactgcaaatttattgaa

SEQ ID NO: 37206 - DNA, 33 bp, Homo sapiens
aggaactgtggcatccaagaagttttcaaagca

SEQ ID NO: 37207 - DNA, 33 bp, Homo sapiens
ctcataaaagtcgccaaataaatgaaaattcga

SEQ ID NO: 37208 - DNA, 33 bp, Homo sapiens
aagtgtctttgaccagaatagtaacttgcaaat

SEQ ID NO: 37209 - DNA, 33 bp, Homo sapiens
gtgactgtggaaaacaaaccagatattcaagtt

SEQ ID NO: 37210 - DNA, 33 bp, Homo sapiens
tgatgctcttcactcactaagtaaatttgagtt

SEQ ID NO: 37211 - DNA, 33 bp, Homo sapiens
agtgattcaaccaaataatgccaaaatcccaga

SEQ ID NO: 37212 - DNA, 33 bp, Homo sapiens
tgcctaggtttttcaagtcctctccagggacag

SEQ ID NO: 37213 - DNA, 33 bp, Homo sapiens
tttatagattccagcaagagagcgacattctca

SEQ ID NO: 37214 - DNA, 33 bp, Homo sapiens
taatcttgggggtctacagcgtgctggtcattc

SEQ ID NO: 37215 - DNA, 33 bp, Homo sapiens
aactgcctatccttaaatattgcaatccaaagg

SEQ ID NO: 37216 - DNA, 33 bp, Homo sapiens
atgaggactaaacgcaacagtgggtatgaaggg

SEQ ID NO: 37217 - DNA, 33 bp, Homo sapiens
tagagattcataaagcaagtgaaataatgttat

SEQ ID NO: 37218 - DNA, 33 bp, Homo sapiens
gtgtgacacccggtaacgtgtccagttgagaaa

SEQ ID NO: 37219 - DNA, 33 bp, Homo sapiens
ccttcttctgctcttacctaaatgcgttccgag

SEQ ID NO: 37220 - DNA, 33 bp, Homo sapiens
agtctcttcctctgtcacatgagagttaatctt

SEQ ID NO: 37221 - DNA, 33 bp, Homo sapiens
acttctcacccaaaagaatctgctattttctct

SEQ ID NO: 37222 - DNA, 33 bp, Homo sapiens
gggcttgcagactggaacagccatgctaaagaa

SEQ ID NO: 37223 - DNA, 51 bp, Homo sapiens
gtccaaattatttgtccaacagcacatagttaatatgaagtagagctagat

SEQ ID NO: 37224 - DNA, 33 bp, Homo sapiens
catccattgagttgcaaataatccagtaaccat

SEQ ID NO: 37225 - DNA, 33 bp, Homo sapiens
cccattagactcaaaacggtcccgcttatatat

SEQ ID NO: 37226 - DNA, 33 bp, Homo sapiens
attttttgaaaattggcacgtgcataatatatg

SEQ ID NO: 37227 - DNA, 33 bp, Homo sapiens
aactttcattttttgaagatgtgagggccaaga

SEQ ID NO: 37228 - DNA, 33 bp, Homo sapiens
tccatagacttgcatcaagagaagaaggagagg

SEQ ID NO: 37229 - DNA, 33 bp, Homo sapiens
agagcaacagctaccaacacaaaatgaaagctc

SEQ ID NO: 37230 - DNA, 33 bp, Homo sapiens
tcaagtttctgcttccaaaaccagaaagaagta

SEQ ID NO: 37231 - DNA, 33 bp, Homo sapiens
atgcatatgaacaaggaccaataatttaaacgt

SEQ ID NO: 37232 - DNA, 33 bp, Homo sapiens
gcccacaatctttcctgaaactatgtattcctt

SEQ ID NO: 37233 - DNA, 33 bp, Homo sapiens
gagaactactgttacagcatcttatttaagtgt

SEQ ID NO: 37234 - DNA, 33 bp, Homo sapiens
catcctgtgtaaatacccactttaaggaactga

SEQ ID NO: 37235 - DNA, 33 bp, Homo sapiens
attctgatgatctgaactgtgtttgagagaaat

SEQ ID NO: 37236 - DNA, 33 bp, Homo sapiens
ctctcaacgatattcaaaagtaaactctgtttc

SEQ ID NO: 37237 - DNA, 33 bp, Homo sapiens
taatctgctgtagaaacttgtcagcttctttct

SEQ ID NO: 37238 - DNA, 33 bp, Homo sapiens
aggtcagaaaggtggaaagaaagagacaaagga

SEQ ID NO: 37239 - DNA, 33 bp, Homo sapiens
gtagataaaagacagacgattccattcaccaaa

SEQ ID NO: 37240 - DNA, 33 bp, Homo sapiens
agaatcttcacgagagccaaccctgcagttatg

SEQ ID NO: 37241 - DNA, 33 bp, Homo sapiens
caatggaccttaaatcgcagtcttgttaatgct

SEQ ID NO: 37242 - DNA, 33 bp, Homo sapiens
ggagtgggaccttctaacacgttcccaatggtg

SEQ ID NO: 37243 - DNA, 33 bp, Homo sapiens
tcccccaccagatgcggcattcaagttgtaaag

SEQ ID NO: 37244 - DNA, 33 bp, Homo sapiens
gcaaacagcagactccaagaccactggaggcct

SEQ ID NO: 37245 - DNA, 33 bp, Homo sapiens
atcgagtgtaggaaaacgaaagacaggtgcagg

SEQ ID NO: 37246 - DNA, 33 bp, Homo sapiens
acaccaaggaagttcaagcatctgggttgattt

SEQ ID NO: 37247 - DNA, 33 bp, Homo sapiens
ccctcctagatatgaacgaagacacatgtggcc

SEQ ID NO: 37248 - DNA, 33 bp, Homo sapiens
cagacattgactgcaccgaaaagccttcttggg

SEQ ID NO: 37249 - DNA, 51 bp, Homo sapiens
atcaaaacaagaggttccctgatgaagaatgacaggagataaggctggaaa

SEQ ID NO: 37250 - DNA, 51 bp, Homo sapiens
actgcagcctgttttattatcatgacgttttgcttctagttatgtgctttt

SEQ ID NO: 37251 - DNA, 33 bp, Homo sapiens
ctgcataccagtcggggagaaaaacaatcaaca

SEQ ID NO: 37252 - DNA, 33 bp, Homo sapiens
ctttatccataaatgcagatggcacggtgcctg

SEQ ID NO: 37253 - DNA, 51 bp, Homo sapiens
cctactctttctcctctctttgctaactcaatgaatggcaccccatccttc

SEQ ID NO: 37254 - DNA, 33 bp, Homo sapiens
tacatatggttgataaagtgaagaattacaaaa

SEQ ID NO: 37255 - DNA, 33 bp, Homo sapiens
ttaatctcccctgaaaacacctgtcgtgatgcc

SEQ ID NO: 37256 - DNA, 33 bp, Homo sapiens
tccaagaccactcagacccttggataagtcacc

SEQ ID NO: 37257 - DNA, 33 bp, Homo sapiens
taacgtgttggaagtccccataaggcacatgag

SEQ ID NO: 37258 - DNA, 33 bp, Homo sapiens
ctctgggacgtttgcacgaggaacattccgaac

SEQ ID NO: 37259 - DNA, 33 bp, Homo sapiens
catacatgcagacaaaagcttataaagaaagtt

SEQ ID NO: 37260 - DNA, 33 bp, Homo sapiens
agccaaacactttactaagaaaaacatatccaa

SEQ ID NO: 37261 - DNA, 33 bp, Homo sapiens
aggtgaaaaatattcactctcaggcccttcaca

SEQ ID NO: 37262 - DNA, 33 bp, Homo sapiens
tggtgcagttcaaatccaggttcatcaagggtc

SEQ ID NO: 37263 - DNA, 33 bp, Homo sapiens
cgtccaatgagaatcacgtgaaagcattgaaag

SEQ ID NO: 37264 - DNA, 33 bp, Homo sapiens
attccgaggtcctgggaagtagtttaggaacag

SEQ ID NO: 37265 - DNA, 33 bp, Homo sapiens
caatgacggtcacaaccgggccagcctcttact

SEQ ID NO: 37266 - DNA, 51 bp, Homo sapiens
acaaatcttgatttatttttggtcacattatcttaatcattgagttggctt

SEQ ID NO: 37267 - DNA, 33 bp, Homo sapiens
actctttggtgtagacaggaggagtccttaata

SEQ ID NO: 37268 - DNA, 33 bp, Homo sapiens
tgaatcttcaggggacaccattctttgcagggc

SEQ ID NO: 37269 - DNA, 33 bp, Homo sapiens
ggggccgtcgcacagaataaatagaaaatgata

SEQ ID NO: 37270 - DNA, 33 bp, Homo sapiens
ggatgtaaacctgaaacgtctgggacaggtctc

SEQ ID NO: 37271 - DNA, 33 bp, Homo sapiens
tgtgctgaagttttcaacgcagtgcctaagcct

SEQ ID NO: 37272 - DNA, 33 bp, Homo sapiens
gcccactacagaagggacaaagaacacatttta

SEQ ID NO: 37273 - DNA, 51 bp, Homo sapiens
tacattctaaacagtttgaaaagacaagtctcaaagagggacctctacgtg

SEQ ID NO: 37274 - DNA, 33 bp, Homo sapiens
aacttttaacctaccactgcatttagaataact

SEQ ID NO: 37275 - DNA, 33 bp, Homo sapiens
caggttttatcagtgaataagttgccatgaagg

SEQ ID NO: 37276 - DNA, 33 bp, Homo sapiens
cttccactggacaagaaggcagatgttgtcact

SEQ ID NO: 37277 - DNA, 33 bp, Homo sapiens
tgcttctgtacaacttcaagcgttgtctgggat

SEQ ID NO: 37278 - DNA, 33 bp, Homo sapiens
gcagttaagtacgctaacaagtctaactctgac

SEQ ID NO: 37279 - DNA, 33 bp, Homo sapiens
caatctgacattgtcacgttcggacaaaaaagt

SEQ ID NO: 37280 - DNA, 33 bp, Homo sapiens
ggatgcagctctgaaaacattcctggtccttgt

SEQ ID NO: 37281 - DNA, 33 bp, Homo sapiens
ctgtatgtctcaaggtcaatcaggtagaaaggt

SEQ ID NO: 37282 - DNA, 33 bp, Homo sapiens
gctacgggaatttagcagagaacgaagtcacct

SEQ ID NO: 37283 - DNA, 33 bp, Homo sapiens
gaaacgcttccaaaaactgcaggaatgatttct

SEQ ID NO: 37284 - DNA, 33 bp, Homo sapiens
agagtaagggctaaacacctggcttatggagtc

SEQ ID NO: 37285 - DNA, 33 bp, Homo sapiens
gcccatgcctgaaacccggcaagcactcagttt

SEQ ID NO: 37286 - DNA, 33 bp, Homo sapiens
taagttttgcaacagaaaaaagtcaatataatg

SEQ ID NO: 37287 - DNA, 33 bp, Homo sapiens
gtaggtgacacgctggacagggatgaagatttc

SEQ ID NO: 37288 - DNA, 51 bp, Homo sapiens
caccccgtcttgggccaatccttcaccaacgcccgtgatctccatgctggc

SEQ ID NO: 37289 - DNA, 33 bp, Homo sapiens
ccctttctcagtcagaccagtaacatcaaaagt

SEQ ID NO: 37290 - DNA, 33 bp, Homo sapiens
agatctttataagtcagtgaaccagtattttcc

SEQ ID NO: 37291 - DNA, 33 bp, Homo sapiens
ctcatttcatttaatcactgtaaaacaacctct

SEQ ID NO: 37292 - DNA, 33 bp, Homo sapiens
tattcaagcttaccaaaaacttttcacatttgt

SEQ ID NO: 37293 - DNA, 51 bp, Homo sapiens
actgttaaacttttggactagtcacgcttgtggtccttagtaagctggtaa

SEQ ID NO: 37294 - DNA, 33 bp, Homo sapiens
catatttgtaaggtacaaggcgtataaaggttt

SEQ ID NO: 37295 - DNA, 33 bp, Homo sapiens
ctttgtgtgggcagaaagttttattattattat

SEQ ID NO: 37296 - DNA, 33 bp, Homo sapiens
atctgtttagggactgaaattacaagactattt

SEQ ID NO: 37297 - DNA, 33 bp, Homo sapiens
aagcatgagcttaggagtatctgtgatcacctt

SEQ ID NO: 37298 - DNA, 33 bp, Homo sapiens
tccttgggcatcatgaccattgtaatctttctt

SEQ ID NO: 37299 - DNA, 33 bp, Homo sapiens
agtcactaaggaaaaaatcagagatactaggag

SEQ ID NO: 37300 - DNA, 51 bp, Homo sapiens
ggtctagcttggaatgggaaaagcactgaagctcgaaagtggtaaagaaaa

SEQ ID NO: 37301 - DNA, 33 bp, Homo sapiens
ccagcgcagtagccaaccaaagaatacgtatat

SEQ ID NO: 37302 - DNA, 33 bp, Homo sapiens
ggctctgtcctttaagaaaatctagtgtgtgtc

SEQ ID NO: 37303 - DNA, 51 bp, Homo sapiens
attcctatttaaatcgtgttacacaaaaaaaattgaattttaaaaaccatg

SEQ ID NO: 37304 - DNA, 33 bp, Homo sapiens
ctatagtttgattccacgagagagtgggtgagg

SEQ ID NO: 37305 - DNA, 33 bp, Homo sapiens
ccaagatcacaagttacatgttagctcccctat

SEQ ID NO: 37306 - DNA, 33 bp, Homo sapiens
gtagagacggttccaacgtgtcttcagtaacca

SEQ ID NO: 37307 - DNA, 33 bp, Homo sapiens
tccctgtcccttagaaaaacaggagcagaagat

SEQ ID NO: 37308 - DNA, 33 bp, Homo sapiens
gattgaagaaggttaacaaatcccagatattag

SEQ ID NO: 37309 - DNA, 33 bp, Homo sapiens
acttccaatctggagaagatcaaatgaggctgc

SEQ ID NO: 37310 - DNA, 33 bp, Homo sapiens
gcaattggtgttcctcaaaaaaggtgtctgtgg

SEQ ID NO: 37311 - DNA, 33 bp, Homo sapiens
tcaacactgggacttacgttaccaaagtaaggg

SEQ ID NO: 37312 - DNA, 33 bp, Homo sapiens
attagaagcaacaaagaccagagaaggttgtca

SEQ ID NO: 37313 - DNA, 33 bp, Homo sapiens
tggtaggtactttgaaccattttgtgccaatta

SEQ ID NO: 37314 - DNA, 33 bp, Homo sapiens
ctgtaagattcaatgacgtctctggtgcagcag

SEQ ID NO: 37315 - DNA, 33 bp, Homo sapiens
agccttggaggaactccgaggaatggttaaaag

SEQ ID NO: 37316 - DNA, 33 bp, Homo sapiens
aaaagccattgatagcaaagtaaagtgagattg

SEQ ID NO: 37317 - DNA, 33 bp, Homo sapiens
aggaaagtaacaatatcataactggatgtgttc

SEQ ID NO: 37318 - DNA, 33 bp, Homo sapiens
ctattcctaaaactgaaggatgagatattatcc

SEQ ID NO: 37319 - DNA, 33 bp, Homo sapiens
taggtagaattgtccccatttaccatcatatcc

SEQ ID NO: 37320 - DNA, 33 bp, Homo sapiens
tcgtgttaacactcctcaactttcttggtcata

SEQ ID NO: 37321 - DNA, 33 bp, Homo sapiens
gtgtagccttcagaacactaatttacaggatgt

SEQ ID NO: 37322 - DNA, 33 bp, Homo sapiens
gttatctttaggccaaactgatcctgctatgag

SEQ ID NO: 37323 - DNA, 33 bp, Homo sapiens
taatttagcatgcaagacagagtgcagcactgg

SEQ ID NO: 37324 - DNA, 33 bp, Homo sapiens
aggagatcaatgggaaagctgttacagtgactc

SEQ ID NO: 37325 - DNA, 51 bp, Homo sapiens
tcactttgctgtaagaataaatcacaagaaaatgtgcaacttggaggttct

SEQ ID NO: 37326 - DNA, 33 bp, Homo sapiens
tgcccagggaccagtccagaagattacaagagg

SEQ ID NO: 37327 - DNA, 33 bp, Homo sapiens
tgttcaaccgatatacagagtgttttataaacc

SEQ ID NO: 37328 - DNA, 33 bp, Homo sapiens
cttccactctccaacacgacaaggtcaatcaaa

SEQ ID NO: 37329 - DNA, 33 bp, Homo sapiens
actgaaggaataggaacgcttctatttatcaaa

SEQ ID NO: 37330 - DNA, 33 bp, Homo sapiens
cacctggaatgagagacccaatttctcctttta

SEQ ID NO: 37331 - DNA, 33 bp, Homo sapiens
tgataataatgatgtcgcacaaaattttaggct

SEQ ID NO: 37332 - DNA, 33 bp, Homo sapiens
ttataccttgactgcaatgactttcaattccgt

SEQ ID NO: 37333 - DNA, 33 bp, Homo sapiens
gatttataactataaaatgtcttgaacaaaatg

SEQ ID NO: 37334 - DNA, 33 bp, Homo sapiens
gccactcctgtagtcaccagttgttcatcagtt

SEQ ID NO: 37335 - DNA, 33 bp, Homo sapiens
gagacctggagtgttaccttcttctctttccta

SEQ ID NO: 37336 - DNA, 33 bp, Homo sapiens
atggctgcaatgaatcaaaaatctgcaagagat

SEQ ID NO: 37337 - DNA, 33 bp, Homo sapiens
tctattttggtatctccatttgggtctgtcaaa

SEQ ID NO: 37338 - DNA, 33 bp, Homo sapiens
gaacaactccatatccgcaaaagcatttttaat

SEQ ID NO: 37339 - DNA, 33 bp, Homo sapiens
ggttaggggattataaaaaatgatgattaaccc

SEQ ID NO: 37340 - DNA, 33 bp, Homo sapiens
cgatgttgacagctacagactgattaccaattt

SEQ ID NO: 37341 - DNA, 51 bp, Homo sapiens
ctgtaaatgtgtaaggcaaaataccacctggtccctgctgccccctgagct

SEQ ID NO: 37342 - DNA, 33 bp, Homo sapiens
actagcctacacaatacggcgagactctgtctc

SEQ ID NO: 37343 - DNA, 33 bp, Homo sapiens
tctgttgcctcatccacgcagttactgtttacc

SEQ ID NO: 37344 - DNA, 33 bp, Homo sapiens
gtgctgggatgctgtacgtaaacctggactttg

SEQ ID NO: 37345 - DNA, 33 bp, Homo sapiens
atattatttcatcccccaggtactaagccttgt

SEQ ID NO: 37346 - DNA, 33 bp, Homo sapiens
cctgccaccaaagcctaaatcttcctgccatac

SEQ ID NO: 37347 - DNA, 33 bp, Homo sapiens
caagtggcaaaataacagtatcaacgagtcaca

SEQ ID NO: 37348 - DNA, 33 bp, Homo sapiens
tttcatttccagttaaagttgaatgtttatcct

SEQ ID NO: 37349 - DNA, 33 bp, Homo sapiens
tttccttgaaacagagaaacagaaaactgccag

SEQ ID NO: 37350 - DNA, 33 bp, Homo sapiens
gaggctgtgcatttcccatgactccggagcttc

SEQ ID NO: 37351 - DNA, 33 bp, Homo sapiens
gtcaaaagggaaaaggcagctgatgaggttaca

SEQ ID NO: 37352 - DNA, 33 bp, Homo sapiens
tccaagcacactcaccagatattaggaaagtta

SEQ ID NO: 37353 - DNA, 33 bp, Homo sapiens
gcctgaagccacacagccagtaaggagctccca

SEQ ID NO: 37354 - DNA, 33 bp, Homo sapiens
cgtgcgtgaagagtacaacacaaaactgtaaac

SEQ ID NO: 37355 - DNA, 33 bp, Homo sapiens
tatgtggcttcacccaccactgagggcagatcc

SEQ ID NO: 37356 - DNA, 33 bp, Homo sapiens
cagtaaaggcagtaacaatctttgatggtagtc

SEQ ID NO: 37357 - DNA, 33 bp, Homo sapiens
gatctggctcaaatcccctgtttatattgatcc

SEQ ID NO: 37358 - DNA, 33 bp, Homo sapiens
tttatgggaggatgaaatcagtataaagatagc

SEQ ID NO: 37359 - DNA, 33 bp, Homo sapiens
tactaataataatgaccgtaaagagttatggca

SEQ ID NO: 37360 - DNA, 33 bp, Homo sapiens
cagtcccatctgataactccacactgttggtga

SEQ ID NO: 37361 - DNA, 33 bp, Homo sapiens
ggctactgccttgcacactgcaggtataggcaa

SEQ ID NO: 37362 - DNA, 33 bp, Homo sapiens
tgcagaaggcaacacaaaagttagcatccatgt

SEQ ID NO: 37363 - DNA, 33 bp, Homo sapiens
gtactagctctccttacgcttagggtggtagat

SEQ ID NO: 37364 - DNA, 33 bp, Homo sapiens
gaagagggaatgattgaataatgagtttggcag

SEQ ID NO: 37365 - DNA, 33 bp, Homo sapiens
gttgaaagagattgatcaacttgtttagagtaa

SEQ ID NO: 37366 - DNA, 33 bp, Homo sapiens
atttctatagaaacacagaagaggaagagcaca

SEQ ID NO: 37367 - DNA, 33 bp, Homo sapiens
ctggacaatcagctaacgcttttagaaaaacag

SEQ ID NO: 37368 - DNA, 33 bp, Homo sapiens
cttgatggttgccttccagcccctgaatagctt

SEQ ID NO: 37369 - DNA, 33 bp, Homo sapiens
tacgtaccagagaatagggcagcttaggaaaaa

SEQ ID NO: 37370 - DNA, 33 bp, Homo sapiens
gctccttctgcctggagccctatttttcccaga

SEQ ID NO: 37371 - DNA, 33 bp, Homo sapiens
ctattatggccatgtgacaagaacccagctctt

SEQ ID NO: 37372 - DNA, 33 bp, Homo sapiens
tgtatgtaatgtcagacagtgttaagtgccatg

SEQ ID NO: 37373 - DNA, 33 bp, Homo sapiens
gacacagtattggcacaaggagggcccagtgaa

SEQ ID NO: 37374 - DNA, 33 bp, Homo sapiens
taaatgtcctatgccaacctacagctttaaaaa

SEQ ID NO: 37375 - DNA, 33 bp, Homo sapiens
tcgttctttagccacacatttggccactggacg

SEQ ID NO: 37376 - DNA, 33 bp, Homo sapiens
aacaacattcgttgcacggtggaaatttcagaa

SEQ ID NO: 37377 - DNA, 33 bp, Homo sapiens
aggaaagcaatcattgcaaactgggaaatgcta

SEQ ID NO: 37378 - DNA, 33 bp, Homo sapiens
tgcttaagagccagtacaagaacagcttaagac

SEQ ID NO: 37379 - DNA, 33 bp, Homo sapiens
actgttgcatggaaagcctatgtccacatagaa

SEQ ID NO: 37380 - DNA, 33 bp, Homo sapiens
ttctacttcagctggacgctattttgtcaattg

SEQ ID NO: 37381 - DNA, 33 bp, Homo sapiens
ctttaggggcatcccaatcttaaggcagggtat

SEQ ID NO: 37382 - DNA, 33 bp, Homo sapiens
tagaagtcaacaagcaaaggagcaacttagctg

SEQ ID NO: 37383 - DNA, 33 bp, Homo sapiens
aatacaatggtaatggaatcccacagtaatttg

SEQ ID NO: 37384 - DNA, 33 bp, Homo sapiens
tgaaaaagagtttaacaatagtcatctgattta

SEQ ID NO: 37385 - DNA, 33 bp, Homo sapiens
tctggggatctgtgtacagttagcagttgcatg

SEQ ID NO: 37386 - DNA, 33 bp, Homo sapiens
actttggcatctcaaacgaagccatcaaggtgg

SEQ ID NO: 37387 - DNA, 33 bp, Homo sapiens
agatcaaaactcaaaactcaaagtatgattatt

SEQ ID NO: 37388 - DNA, 33 bp, Homo sapiens
gtaactgtgaagtctgaaatctcatgtgaccac

SEQ ID NO: 37389 - DNA, 33 bp, Homo sapiens
caacaacatcctttcacggccaaaaagcatcca

SEQ ID NO: 37390 - DNA, 51 bp, Homo sapiens
ctggcaagaactataatcctattaaaccctcaataatgtgtaaacatacat

SEQ ID NO: 37391 - DNA, 33 bp, Homo sapiens
gctggaatttaaatggaacatatagatgctaat

SEQ ID NO: 37392 - DNA, 33 bp, Homo sapiens
tagcttatccattgaaaacttaacagcactcag

SEQ ID NO: 37393 - DNA, 51 bp, Homo sapiens
tctctatgggggaaggccatgaataacctcttgcctgtatgttgagaagag

SEQ ID NO: 37394 - DNA, 33 bp, Homo sapiens
gggtaggactttccagaactctattttacctgt

SEQ ID NO: 37395 - DNA, 33 bp, Homo sapiens
tctttcccctgcttcacgatgggcctatgtgtc

SEQ ID NO: 37396 - DNA, 33 bp, Homo sapiens
taaccctcaatatctcagaatgtgactatttgg

SEQ ID NO: 37397 - DNA, 33 bp, Homo sapiens
aattttacttcactcacatcactggcgtcaact

SEQ ID NO: 37398 - DNA, 33 bp, Homo sapiens
tagtggtctgattcaacgtgacctgctccctct

SEQ ID NO: 37399 - DNA, 33 bp, Homo sapiens
tcccaaggcaaagctaacaaatgatattactat

SEQ ID NO: 37400 - DNA, 33 bp, Homo sapiens
actgctcaacactccaataaatcctgagaccat

SEQ ID NO: 37401 - DNA, 33 bp, Homo sapiens
tctggtttgttacagacagcctcagaattcagg

SEQ ID NO: 37402 - DNA, 33 bp, Homo sapiens
taggtagaagggttgaataattgtagatgaagt

SEQ ID NO: 37403 - DNA, 33 bp, Homo sapiens
ccatcccagaaacacactgtgcatccccactgt

SEQ ID NO: 37404 - DNA, 33 bp, Homo sapiens
atgaaggacctccaagacaggatatatatgaag

SEQ ID NO: 37405 - DNA, 33 bp, Homo sapiens
cagctgtggtctctaacgcaaaaataagatact

SEQ ID NO: 37406 - DNA, 33 bp, Homo sapiens
aaagctgaactcataaaaacagagagttagaat

SEQ ID NO: 37407 - DNA, 51 bp, Homo sapiens
ggacttgaagttttgaaatctttaacaggcatacaaatggctgcaccactt

SEQ ID NO: 37408 - DNA, 33 bp, Homo sapiens
tgggtccctgagtaaactcaatagaaaagccgc

SEQ ID NO: 37409 - DNA, 33 bp, Homo sapiens
ggagacattaaactgacacagcaatcacaccct

SEQ ID NO: 37410 - DNA, 51 bp, Homo sapiens
aaaattggagtttgcctagtcctgcaaagttctgttccaaaagggaaataa

SEQ ID NO: 37411 - DNA, 33 bp, Homo sapiens
aagaccagtccaagaaccaaaatatcaaaacct

SEQ ID NO: 37412 - DNA, 33 bp, Homo sapiens
actattttcaaagtgaataactgcagctagtcg

SEQ ID NO: 37413 - DNA, 51 bp, Homo sapiens
gcaaaacagtccagtgttattatgacgatttttgttagtccttagcacttg

SEQ ID NO: 37414 - DNA, 33 bp, Homo sapiens
gaggaataggaatagacgagtaaagtgaccagt

SEQ ID NO: 37415 - DNA, 33 bp, Homo sapiens
gaaactgccaacagggacagcgagggtgaccat

SEQ ID NO: 37416 - DNA, 33 bp, Homo sapiens
gacatctctgagaggggataatttgagttaaga

SEQ ID NO: 37417 - DNA, 33 bp, Homo sapiens
tttccggtgacagatacactctatccaaatctt

SEQ ID NO: 37418 - DNA, 33 bp, Homo sapiens
ggtctgtatccttaaaagtaaagatgagttagc

SEQ ID NO: 37419 - DNA, 33 bp, Homo sapiens
ttcttggaagttgtagaccaaagatactattca

SEQ ID NO: 37420 - DNA, 51 bp, Homo sapiens
cctgacccaggctaggagcagttgaggccttcatagaataaccacatgttc

SEQ ID NO: 37421 - DNA, 33 bp, Homo sapiens
gaaagcagagaggaaactagctaagtaggtaaa

SEQ ID NO: 37422 - DNA, 33 bp, Homo sapiens
tctacccctggaccccacaaggtcatgcccttc

SEQ ID NO: 37423 - DNA, 33 bp, Homo sapiens
gcagagataacattgacctgaactttgtatcta

SEQ ID NO: 37424 - DNA, 33 bp, Homo sapiens
atatcactttgctttcacccttattccatccat

SEQ ID NO: 37425 - DNA, 33 bp, Homo sapiens
agaaaaagctacctgacgccaagaaagaaacac

SEQ ID NO: 37426 - DNA, 33 bp, Homo sapiens
ggacaagtaggaactgcacttttgcacaaatca

SEQ ID NO: 37427 - DNA, 33 bp, Homo sapiens
tggcactggctactcacggtatttccaattaaa

SEQ ID NO: 37428 - DNA, 33 bp, Homo sapiens
cataaggccacatagacgcagctagggggagat

SEQ ID NO: 37429 - DNA, 33 bp, Homo sapiens
gaaccttccggaagacagtcatcaaaacaaaaa

SEQ ID NO: 37430 - DNA, 33 bp, Homo sapiens
ctcccttgacttatgaacctccaataagctaaa

SEQ ID NO: 37431 - DNA, 33 bp, Homo sapiens
atttaatatatcttaacgtttggttctgatgtc

SEQ ID NO: 37432 - DNA, 33 bp, Homo sapiens
ataaaaacatgacatcgacatattaccctccca

SEQ ID NO: 37433 - DNA, 33 bp, Homo sapiens
aagagcctaattcctaacttgaaggttgttttg

SEQ ID NO: 37434 - DNA, 33 bp, Homo sapiens
agaaatgttttaaaaactgagagccattgcact

SEQ ID NO: 37435 - DNA, 33 bp, Homo sapiens
cattaaactacagaacaatccttccattacctt

SEQ ID NO: 37436 - DNA, 33 bp, Homo sapiens
caatgcttggctcaaaattaaagagaagcatgg

SEQ ID NO: 37437 - DNA, 33 bp, Homo sapiens
atttaacatattaaaccgagtgctagagccaag

SEQ ID NO: 37438 - DNA, 33 bp, Homo sapiens
tttaaaaaagctcaagaaaaatgcatctaattg

SEQ ID NO: 37439 - DNA, 33 bp, Homo sapiens
tcaataattttattcaagatgaggatatgagcc

SEQ ID NO: 37440 - DNA, 33 bp, Homo sapiens
caacatccttttgctacagagttgtttttttta

SEQ ID NO: 37441 - DNA, 33 bp, Homo sapiens
tttctacttattgctggaggtaatcacattcca

SEQ ID NO: 37442 - DNA, 33 bp, Homo sapiens
cacatctcacatcaaccagtgattggaaaacga

SEQ ID NO: 37443 - DNA, 33 bp, Homo sapiens
aaaaacagcaagctggaaactttaagcagaaac

SEQ ID NO: 37444 - DNA, 33 bp, Homo sapiens
ggtaattaacaaacaccgatcatttgaaggagt

SEQ ID NO: 37445 - DNA, 33 bp, Homo sapiens
gaagatgaaagagagtaaatgcaggaacaggtg

SEQ ID NO: 37446 - DNA, 33 bp, Homo sapiens
tggttaatccatttcaatgaaaacaaccttgat

SEQ ID NO: 37447 - DNA, 33 bp, Homo sapiens
tggttctgaggccttcaaatttagactgaacca

SEQ ID NO: 37448 - DNA, 33 bp, Homo sapiens
ccattgccctgggagccatcgcaatgaggccag

SEQ ID NO: 37449 - DNA, 33 bp, Homo sapiens
gataggaaaaccaataacaatgtcaaacctagc

SEQ ID NO: 37450 - DNA, 33 bp, Homo sapiens
tctctaccagtgtttcccaatgagtagtgatca

SEQ ID NO: 37451 - DNA, 33 bp, Homo sapiens
ctgtctatcgtgatccacattttgttttaaaaa

SEQ ID NO: 37452 - DNA, 33 bp, Homo sapiens
tgacctttatcacttacgagaatatgcttgcta

SEQ ID NO: 37453 - DNA, 33 bp, Homo sapiens
gatgccttggttattgccaacactcctgcagat

SEQ ID NO: 37454 - DNA, 51 bp, Homo sapiens
agaaacaaattaggatacatccataaaatagaacactacttagcggtaaca

SEQ ID NO: 37455 - DNA, 33 bp, Homo sapiens
cgcggcctgcatcttcacagtctgcatgctggt

SEQ ID NO: 37456 - DNA, 33 bp, Homo sapiens
ttttatgtcaaagaggaattttaggatgatatg

SEQ ID NO: 37457 - DNA, 33 bp, Homo sapiens
atacttgcagagctagaagtgaatcaggggaat

SEQ ID NO: 37458 - DNA, 33 bp, Homo sapiens
tggcattttggttctaaattttggtagcctttc

SEQ ID NO: 37459 - DNA, 33 bp, Homo sapiens
aactaacttgacgtacaagcacctctgtaaata

SEQ ID NO: 37460 - DNA, 33 bp, Homo sapiens
aaattatggcctataaccatcctttccaaaaat

SEQ ID NO: 37461 - DNA, 33 bp, Homo sapiens
ttggtgtattgaagtcagaatacctgtgcctgc

SEQ ID NO: 37462 - DNA, 33 bp, Homo sapiens
atccttcaggcactcccccctaaatattgcttc

SEQ ID NO: 37463 - DNA, 51 bp, Homo sapiens
aggtaaaaaaaaacacttttaccagacaggacattgcaaggccacagagat

SEQ ID NO: 37464 - DNA, 33 bp, Homo sapiens
tctaagtatctgggacactagttggtacaaaac

SEQ ID NO: 37465 - DNA, 33 bp, Homo sapiens
acagcaaggctgaaacgatcagaatgtgggaga

SEQ ID NO: 37466 - DNA, 33 bp, Homo sapiens
agtgaatcaagttaataatctacagccttcctt

SEQ ID NO: 37467 - DNA, 33 bp, Homo sapiens
aagtacctaagtaaaactccacttagccagaat

SEQ ID NO: 37468 - DNA, 33 bp, Homo sapiens
agtggttcttgctccaatgaattgtttttgcac

SEQ ID NO: 37469 - DNA, 33 bp, Homo sapiens
aagtgcatacctcccacaaggaatctacaacag

SEQ ID NO: 37470 - DNA, 33 bp, Homo sapiens
caagggcctacctaaactcaaagggagggaaca

SEQ ID NO: 37471 - DNA, 33 bp, Homo sapiens
cattcaaggacatttacggtttacccaaatagg

SEQ ID NO: 37472 - DNA, 33 bp, Homo sapiens
aagctgaaagagcgaccggcagttcagaatttc

SEQ ID NO: 37473 - DNA, 33 bp, Homo sapiens
gatcttcaggcagaaccaagaggagttgcatgt

SEQ ID NO: 37474 - DNA, 33 bp, Homo sapiens
aaattcaaacacaaaacaggcaccaactatatc

SEQ ID NO: 37475 - DNA, 33 bp, Homo sapiens
agacagagtctggctacggagtcccgttatggg

SEQ ID NO: 37476 - DNA, 33 bp, Homo sapiens
ccagaaatacatatgaacacagcattgaggata

SEQ ID NO: 37477 - DNA, 33 bp, Homo sapiens
accagatatggcttcagaggagggaacagtgca

SEQ ID NO: 37478 - DNA, 33 bp, Homo sapiens
tgggtcagcaactctactaagacttataaatag

SEQ ID NO: 37479 - DNA, 33 bp, Homo sapiens
aatgccgcagggaggaacttgcagcatttcttg

SEQ ID NO: 37480 - DNA, 33 bp, Homo sapiens
gacgttttaaccgagcactgatggtggtgtatt

SEQ ID NO: 37481 - DNA, 51 bp, Homo sapiens
catccatgttttagcatatgtcagcactacaatcctttttaaacctgaata

SEQ ID NO: 37482 - DNA, 33 bp, Homo sapiens
ccacaaagggacaactaagaaaataagaaatgg

SEQ ID NO: 37483 - DNA, 33 bp, Homo sapiens
ctgtcacatgtgtgagccaagttagaagcaatg

SEQ ID NO: 37484 - DNA, 33 bp, Homo sapiens
gacagaacgcctatgaaaacatgtgccagtctg

SEQ ID NO: 37485 - DNA, 33 bp, Homo sapiens
aagagattctaacagcaaaaagctcactactct

SEQ ID NO: 37486 - DNA, 33 bp, Homo sapiens
tagggagggactgagacgtgaccagcagctgga

SEQ ID NO: 37487 - DNA, 33 bp, Homo sapiens
atataaacttcccttacgcagcttttcagcaac

SEQ ID NO: 37488 - DNA, 33 bp, Homo sapiens
ttataactgagaaaatgatgacggtgaaagaga

SEQ ID NO: 37489 - DNA, 51 bp, Homo sapiens
ttacctagaaattgaaattaacattcaactctcaggtctccaagtccaaag

SEQ ID NO: 37490 - DNA, 33 bp, Homo sapiens
accccaaaagatgtgaaaggacttgttacgtaa

SEQ ID NO: 37491 - DNA, 33 bp, Homo sapiens
agatagcatttgtaccccaaggtcagtggccca

SEQ ID NO: 37492 - DNA, 33 bp, Homo sapiens
tttaatgctgagtttaaaactggaattcagcaa

SEQ ID NO: 37493 - DNA, 33 bp, Homo sapiens
gtgaggggaggtcacactgaaacagaagttagg

SEQ ID NO: 37494 - DNA, 51 bp, Homo sapiens
cagacaagaggttctgattctgagaggtgtagactcccttgggactttagg

SEQ ID NO: 37495 - DNA, 33 bp, Homo sapiens
aaacacagatctctaaacaactcaactaaatca

SEQ ID NO: 37496 - DNA, 33 bp, Homo sapiens
gcaagtccaaaattcacaggaccggctggcagg

SEQ ID NO: 37497 - DNA, 33 bp, Homo sapiens
ctgaggaaagttaggaaaggaaagctggccaaa

SEQ ID NO: 37498 - DNA, 33 bp, Homo sapiens
aaattgcctggcaaaacgttaactctcaaatct

SEQ ID NO: 37499 - DNA, 51 bp, Homo sapiens
atattatgctgtaatacactgttcaaatattatgagattctaatggttaaa

SEQ ID NO: 37500 - DNA, 33 bp, Homo sapiens
ttcattatgtgcaaagcctcctgactgaaaatc

SEQ ID NO: 37501 - DNA, 33 bp, Homo sapiens
gtgagtcctattgaaccctgcagacaaacccct

SEQ ID NO: 37502 - DNA, 33 bp, Homo sapiens
agagggtgtaatgttacggaggccaagagaaga

SEQ ID NO: 37503 - DNA, 33 bp, Homo sapiens
gcatttgatgactgcactaatctttgtaattcc

SEQ ID NO: 37504 - DNA, 51 bp, Homo sapiens
ttaagccaacaagattttgcttacaaccctagtaggaaagtaaccttgaaa

SEQ ID NO: 37505 - DNA, 33 bp, Homo sapiens
gatggatttgaacaggcacccaagactatactg

SEQ ID NO: 37506 - DNA, 33 bp, Homo sapiens
tgtgtctcagtgtaaacttcttaagattcaacc

SEQ ID NO: 37507 - DNA, 51 bp, Homo sapiens
gtggtagcagcaggaggttggtttaaagtagcttaattgtattgtctgccc

SEQ ID NO: 37508 - DNA, 33 bp, Homo sapiens
atagagcaaactgtcaagcagtacttaactcac

SEQ ID NO: 37509 - DNA, 51 bp, Homo sapiens
catgaccacaggttccatgatgctacgtctctatgtaggcgtattttcagt

SEQ ID NO: 37510 - DNA, 51 bp, Homo sapiens
tttagttcatctgttctttcgttcaacccttagagaggtcatgtagtagca

SEQ ID NO: 37511 - DNA, 33 bp, Homo sapiens
ctttgctgaaactcgcccagtgttggaaaactc

SEQ ID NO: 37512 - DNA, 33 bp, Homo sapiens
tcctagggccatctagcaggagcggtgcaagag

SEQ ID NO: 37513 - DNA, 33 bp, Homo sapiens
tgagctctccattgataagaatcttcccatctc

SEQ ID NO: 37514 - DNA, 51 bp, Homo sapiens
aatgacaaaatgtccaacacttcaagtattttcctttagaaactgtacatc

SEQ ID NO: 37515 - DNA, 33 bp, Homo sapiens
attacccacaaacagaacacttggagtccagat

SEQ ID NO: 37516 - DNA, 33 bp, Homo sapiens
attggagggaggccagaatacattagcgttctg

SEQ ID NO: 37517 - DNA, 33 bp, Homo sapiens
aggcagccaaattttacgttggagctgtgtgta

SEQ ID NO: 37518 - DNA, 33 bp, Homo sapiens
tttgctaattctggcacaggttttgctgtcagg

SEQ ID NO: 37519 - DNA, 33 bp, Homo sapiens
gaacaagtaccaaagagcaagtgcttattgagt

SEQ ID NO: 37520 - DNA, 33 bp, Homo sapiens
aataagaggcaggaagaaaactaaagaatgagg

SEQ ID NO: 37521 - DNA, 33 bp, Homo sapiens
ccaagagaggtcagaagaattcaatctgatgtg

SEQ ID NO: 37522 - DNA, 33 bp, Homo sapiens
tagtaacctccctttccccctttgcactggttt

SEQ ID NO: 37523 - DNA, 33 bp, Homo sapiens
cttaaatcaccacgccaatcttgccagtgcgaa

SEQ ID NO: 37524 - DNA, 33 bp, Homo sapiens
gaaagtgtatgacaaacgaaagctggaataaat

SEQ ID NO: 37525 - DNA, 33 bp, Homo sapiens
tgtatggaagagaggtcaactatccgagagaca

SEQ ID NO: 37526 - DNA, 33 bp, Homo sapiens
gctgtatcctcccatcaaatggaaattagttgg

SEQ ID NO: 37527 - DNA, 33 bp, Homo sapiens
gcagaggtggaaacagaacgggaactacttgaa

SEQ ID NO: 37528 - DNA, 33 bp, Homo sapiens
acactttagatgtgggaatgaaataaataggac

SEQ ID NO: 37529 - DNA, 33 bp, Homo sapiens
acttcatgtctatcacaaatgcatcatcaccca

SEQ ID NO: 37530 - DNA, 33 bp, Homo sapiens
aggtaacattgacaacagacagaaaccatgcac

SEQ ID NO: 37531 - DNA, 33 bp, Homo sapiens
gtcctaatccccatacccatgtaagtgacctta

SEQ ID NO: 37532 - DNA, 33 bp, Homo sapiens
aggggaattttggttccatttgtgctcttgtgt

SEQ ID NO: 37533 - DNA, 33 bp, Homo sapiens
ctcacctgtcctttggaaaagatggtctccact

SEQ ID NO: 37534 - DNA, 33 bp, Homo sapiens
ttctctgtacatatgcaactcctaataaaaggc

SEQ ID NO: 37535 - DNA, 33 bp, Homo sapiens
ggtagggatgaaacacgccctagtctcctgcag

SEQ ID NO: 37536 - DNA, 33 bp, Homo sapiens
caagattgttgaccctcaaatgttgccagagct

SEQ ID NO: 37537 - DNA, 33 bp, Homo sapiens
gttttattgctctgcacgtgtgtcacattttaa

SEQ ID NO: 37538 - DNA, 33 bp, Homo sapiens
atcctcatcctatcatcagggactgtcaagagc

SEQ ID NO: 37539 - DNA, 51 bp, Homo sapiens
gtccttaagcgcaaggtccaaataacgttgacctttgtattcccagcatcc

SEQ ID NO: 37540 - DNA, 51 bp, Homo sapiens
ctgagtgaactcactgccaagatccacgtaagaatatttaaagtcacagat

SEQ ID NO: 37541 - DNA, 33 bp, Homo sapiens
aaacagcatcatctcaccagtttttgttttgag

SEQ ID NO: 37542 - DNA, 33 bp, Homo sapiens
attttagagacttgcactatttgacaaatggta

SEQ ID NO: 37543 - DNA, 33 bp, Homo sapiens
tgatttccttttatcgaatctttccaaagcgtc

SEQ ID NO: 37544 - DNA, 33 bp, Homo sapiens
tagacagtgtccagctcaatatttgttgaagga

SEQ ID NO: 37545 - DNA, 33 bp, Homo sapiens
tgttgaattaccaagacgtttcctcacctgtaa

SEQ ID NO: 37546 - DNA, 33 bp, Homo sapiens
atgctctactatgaacaaggacattctcaggac

SEQ ID NO: 37547 - DNA, 33 bp, Homo sapiens
tttgttttgcttgagaaacacaattgctgctat

SEQ ID NO: 37548 - DNA, 33 bp, Homo sapiens
ggagggcttattctaacgattgtccaggctcct

SEQ ID NO: 37549 - DNA, 33 bp, Homo sapiens
gaatttgaatatggcacaatgatttgtcattta

SEQ ID NO: 37550 - DNA, 33 bp, Homo sapiens
tttctctctttctcaccgcagggaacagcattg

SEQ ID NO: 37551 - DNA, 33 bp, Homo sapiens
tgggcatcactaaaggcataaggtattttcagt

SEQ ID NO: 37552 - DNA, 33 bp, Homo sapiens
gtcgtgcaggttgcacaggaaatctgcgattcc

SEQ ID NO: 37553 - DNA, 33 bp, Homo sapiens
tgaccagttgaacagaatagggatgtcaaaaac

SEQ ID NO: 37554 - DNA, 33 bp, Homo sapiens
cagtaagcacaggttagagttctagcaatcact

SEQ ID NO: 37555 - DNA, 33 bp, Homo sapiens
aggttcttgagatcccaataaatataacaaatc

SEQ ID NO: 37556 - DNA, 33 bp, Homo sapiens
aatctgcagagctgccaaaagtaccttgatgtt

SEQ ID NO: 37557 - DNA, 51 bp, Homo sapiens
tttccagtgcactagatgaaaaataccaatgaagagtagaataaagacaaa

SEQ ID NO: 37558 - DNA, 33 bp, Homo sapiens
ggaaactcgaatcttccagtatcggcaaaggga

SEQ ID NO: 37559 - DNA, 33 bp, Homo sapiens
ttcctggatgcgggacaagaactcaggacttgc

SEQ ID NO: 37560 - DNA, 33 bp, Homo sapiens
gagaaagaccatatctcaaagagagagagagag

SEQ ID NO: 37561 - DNA, 33 bp, Homo sapiens
cctgcatacagtgctcacctgcatggggtgctc

SEQ ID NO: 37562 - DNA, 33 bp, Homo sapiens
ctgtcacaacaactcaaccctgctgttacagcg

SEQ ID NO: 37563 - DNA, 33 bp, Homo sapiens
tctggtgttggtgctacaggagaatgcataagt

SEQ ID NO: 37564 - DNA, 33 bp, Homo sapiens
ggatgtagtgctggaaataagtgaaatgcaatc

SEQ ID NO: 37565 - DNA, 33 bp, Homo sapiens
tctctttaaacttacaatgatcataacctttga

SEQ ID NO: 37566 - DNA, 33 bp, Homo sapiens
tctgtgaccacaataaaataacagaagtcaacg

SEQ ID NO: 37567 - DNA, 33 bp, Homo sapiens
aggcccctagagaagccgcaagagggtttccag

SEQ ID NO: 37568 - DNA, 51 bp, Homo sapiens
gagccatgtcatggttaccaagctaaagtttttgttcattatgtatcttca

SEQ ID NO: 37569 - DNA, 33 bp, Homo sapiens
tttgtgaactgaccttcccattcctgagttcct

SEQ ID NO: 37570 - DNA, 33 bp, Homo sapiens
ccactaacaaggtcccaagaataccgagagtga

SEQ ID NO: 37571 - DNA, 51 bp, Homo sapiens
aaattggcctacttatatatggacaactgatttgcaaccaacgtgcacaga

SEQ ID NO: 37572 - DNA, 51 bp, Homo sapiens
atgaaaaggtaattaaaaattcacaaggaaatgtaaaggacataaactagc

SEQ ID NO: 37573 - DNA, 33 bp, Homo sapiens
atcccaaggaacctgcaagaccctcctagaaac

SEQ ID NO: 37574 - DNA, 33 bp, Homo sapiens
cggtcgagctgtttccaatctttaggaactggc

SEQ ID NO: 37575 - DNA, 33 bp, Homo sapiens
gagacagtgattttaaacagggtagtcggggta

SEQ ID NO: 37576 - DNA, 33 bp, Homo sapiens
agagaatttgttggacaaggaagttgagctaag

SEQ ID NO: 37577 - DNA, 33 bp, Homo sapiens
cacccggccggctggtaaatttcttagctcaac

SEQ ID NO: 37578 - DNA, 33 bp, Homo sapiens
cagatctaacaaaagcaaaaggaagcaactcat

SEQ ID NO: 37579 - DNA, 33 bp, Homo sapiens
tctaacatagctcgtcccttgaattgtcactga

SEQ ID NO: 37580 - DNA, 33 bp, Homo sapiens
atataggatgaaatacaccaagatttgtccaaa

SEQ ID NO: 37581 - DNA, 33 bp, Homo sapiens
ttcttcacctagaggaacatttagccaaggaaa

SEQ ID NO: 37582 - DNA, 33 bp, Homo sapiens
caccctagcatgcaaactgtttgatgggacgca

SEQ ID NO: 37583 - DNA, 33 bp, Homo sapiens
cattgcatcataaaaaaaaacaaccagtgtata

SEQ ID NO: 37584 - DNA, 33 bp, Homo sapiens
tctcttttacaggctgcactaggaaatcctcag

SEQ ID NO: 37585 - DNA, 33 bp, Homo sapiens
tggatatgtcatctaacataaatggaatcataa

SEQ ID NO: 37586 - DNA, 33 bp, Homo sapiens
cacagaatagctccgacggtttaaccaatagca

SEQ ID NO: 37587 - DNA, 33 bp, Homo sapiens
agagtggcctattcaaataagcccagattaatg

SEQ ID NO: 37588 - DNA, 33 bp, Homo sapiens
ttatttgagcaatgcactaggcactgactgggg

SEQ ID NO: 37589 - DNA, 33 bp, Homo sapiens
gatggtcattaccgggaatggaaggagggttga

SEQ ID NO: 37590 - DNA, 33 bp, Homo sapiens
aaatgctgataaatacaaactgaactcacttct

SEQ ID NO: 37591 - DNA, 33 bp, Homo sapiens
ttctcccaatacaggaacttttggaggtcactt

SEQ ID NO: 37592 - DNA, 33 bp, Homo sapiens
ctcttgtggcccctccaaaggtcctgtgcctcc

SEQ ID NO: 37593 - DNA, 33 bp, Homo sapiens
agtgcccaatccttcaagtcatgttgggctgct

SEQ ID NO: 37594 - DNA, 33 bp, Homo sapiens
tgtatttcacctctaacggaagaaattcttaag

SEQ ID NO: 37595 - DNA, 33 bp, Homo sapiens
agttgtatctccttgacgctttcattggcattt

SEQ ID NO: 37596 - DNA, 51 bp, Homo sapiens
aagtagtttattttttttaatttcaagtgatgtaatttaaaacctaagttg

SEQ ID NO: 37597 - DNA, 33 bp, Homo sapiens
gctactctgtgtataccatgatgtataactcca

SEQ ID NO: 37598 - DNA, 33 bp, Homo sapiens
tcgcttcctggttgaacgatgaaaaatgattgt

SEQ ID NO: 37599 - DNA, 33 bp, Homo sapiens
gccttcctgacctggaaagaggtgttggtcttc

SEQ ID NO: 37600 - DNA, 51 bp, Homo sapiens
cctagtaatgggttactatggtgataaggattaggataatggagatggcgc

SEQ ID NO: 37601 - DNA, 33 bp, Homo sapiens
ttcctgttgcactgaaagctctaagtaagatga

SEQ ID NO: 37602 - DNA, 33 bp, Homo sapiens
acacagtgtgctattcaatgccgtctgctctgg

SEQ ID NO: 37603 - DNA, 33 bp, Homo sapiens
tctattacattctgacggactaataaaaccctg

SEQ ID NO: 37604 - DNA, 33 bp, Homo sapiens
aatcccagaaatagaacgttgactggaaaaagc

SEQ ID NO: 37605 - DNA, 51 bp, Homo sapiens
ttttcaccaaggtctactggcacataaaaataagtaagtcaggctccaacc

SEQ ID NO: 37606 - DNA, 33 bp, Homo sapiens
gtgtttatgaagtaagaccattcaaaatcaaat

SEQ ID NO: 37607 - DNA, 33 bp, Homo sapiens
aagaacagaagaactcaaatgaagccagtgagg

SEQ ID NO: 37608 - DNA, 33 bp, Homo sapiens
cctgcattgagctacaagacaagactggggcct

SEQ ID NO: 37609 - DNA, 33 bp, Homo sapiens
actcactccatccagtaaccagagtctactcca

SEQ ID NO: 37610 - DNA, 33 bp, Homo sapiens
ggcgtggggcctgccaaatgtcttgagcctgct

SEQ ID NO: 37611 - DNA, 33 bp, Homo sapiens
tatttaggatagaaagaaacaagctctccctaa

SEQ ID NO: 37612 - DNA, 33 bp, Homo sapiens
taagtgttttattggcagaataatttgcaaaca

SEQ ID NO: 37613 - DNA, 33 bp, Homo sapiens
atacatcaattttcccacaggacgggtctccaa

SEQ ID NO: 37614 - DNA, 33 bp, Homo sapiens
gtaaacttaattggcaaatctgagcagatgaaa

SEQ ID NO: 37615 - DNA, 33 bp, Homo sapiens
tttgttctgtttcgaactggtcttacaaaatgc

SEQ ID NO: 37616 - DNA, 33 bp, Homo sapiens
agtctctctcattgcaccaaggtaacaaacctg

SEQ ID NO: 37617 - DNA, 33 bp, Homo sapiens
ggaagccttcattaacaaggacggatggcaggg

SEQ ID NO: 37618 - DNA, 33 bp, Homo sapiens
gtggccggaatgcagaaatgaagcactgagcac

SEQ ID NO: 37619 - DNA, 33 bp, Homo sapiens
aactacctctactaaccaccatctaagcatgga

SEQ ID NO: 37620 - DNA, 33 bp, Homo sapiens
gcacttgtgcttgataaaggcagagtaagttga

SEQ ID NO: 37621 - DNA, 33 bp, Homo sapiens
cctacatggctatccacagaaaactggctaaat

SEQ ID NO: 37622 - DNA, 33 bp, Homo sapiens
cagcctatactctatgcagcctcacagtgaact

SEQ ID NO: 37623 - DNA, 33 bp, Homo sapiens
aataagtccctcgatcaattcatcatgcctgtg

SEQ ID NO: 37624 - DNA, 33 bp, Homo sapiens
gtaatgaattgattgacggatatttgttttcaa

SEQ ID NO: 37625 - DNA, 33 bp, Homo sapiens
gactaaccagttacaacagaatgggtgcctata

SEQ ID NO: 37626 - DNA, 33 bp, Homo sapiens
ggtgcacatggatataaagatgcgaacaacaga

SEQ ID NO: 37627 - DNA, 33 bp, Homo sapiens
aagacttggagtacatcagagcatctcataagt

SEQ ID NO: 37628 - DNA, 33 bp, Homo sapiens
agtatgaatctataaaacaccagcaagtggagc

SEQ ID NO: 37629 - DNA, 33 bp, Homo sapiens
ataaacagtggtagcacatcacaaaattatacc

SEQ ID NO: 37630 - DNA, 33 bp, Homo sapiens
tttcagtccccaggtccctaacatcaaatgtat

SEQ ID NO: 37631 - DNA, 33 bp, Homo sapiens
caatagcatgataaggcaggcactaatctcatc

SEQ ID NO: 37632 - DNA, 33 bp, Homo sapiens
agcaaccattcctgcaaggtttttttggttatt

SEQ ID NO: 37633 - DNA, 33 bp, Homo sapiens
aaagtagaatgtgatcaaaaaaactctcagttg

SEQ ID NO: 37634 - DNA, 33 bp, Homo sapiens
cttggattagccactgcatatgaagcttcccca

SEQ ID NO: 37635 - DNA, 33 bp, Homo sapiens
attaaatgaaggtttagaattggctacctttgt

SEQ ID NO: 37636 - DNA, 33 bp, Homo sapiens
gcgggcatgaaggcacgcctaatggaatattca

SEQ ID NO: 37637 - DNA, 33 bp, Homo sapiens
tcatgtacaggttaaccaaaaatgtcacatttc

SEQ ID NO: 37638 - DNA, 33 bp, Homo sapiens
gttatcttgctcctcaggtggtagcacttgtca

SEQ ID NO: 37639 - DNA, 33 bp, Homo sapiens
atatccaaattctgagaatccgaaagtggacat

SEQ ID NO: 37640 - DNA, 33 bp, Homo sapiens
tcagtgagatatgacacaaaaagttctcatctc

SEQ ID NO: 37641 - DNA, 33 bp, Homo sapiens
ccctgagcaccttacagaacatagcaattcctt

SEQ ID NO: 37642 - DNA, 33 bp, Homo sapiens
ttaaatttccatctaccgacactctgctgaagc

SEQ ID NO: 37643 - DNA, 33 bp, Homo sapiens
cttaattgttcttatccgaaagttactgtgcat

SEQ ID NO: 37644 - DNA, 33 bp, Homo sapiens
gattctcacaggaacacgaactctactgtcaac

SEQ ID NO: 37645 - DNA, 33 bp, Homo sapiens
ttctcttgtactagaccaggaatcagcaagtat

SEQ ID NO: 37646 - DNA, 33 bp, Homo sapiens
ccactaattcttatgccatgcctatatccacaa

SEQ ID NO: 37647 - DNA, 33 bp, Homo sapiens
tcctttatgtaggtaacgtgttcaaacataagt

SEQ ID NO: 37648 - DNA, 33 bp, Homo sapiens
cacgcagttggtcacacaaagtagcaacacggc

SEQ ID NO: 37649 - DNA, 33 bp, Homo sapiens
acagatattgtaagttaaaatcagatagtgtat

SEQ ID NO: 37650 - DNA, 33 bp, Homo sapiens
agcatagttttaaacagtctgagaggttagtcc

SEQ ID NO: 37651 - DNA, 51 bp, Homo sapiens
ggcccaggtaaaatatgtgttgaacaagttgttttgtcttactctacaatt

SEQ ID NO: 37652 - DNA, 33 bp, Homo sapiens
aatcaattaatgaaaaagttgtgaacaaatggt

SEQ ID NO: 37653 - DNA, 33 bp, Homo sapiens
ctattcactacaaatcaccaaagttatctctta

SEQ ID NO: 37654 - DNA, 33 bp, Homo sapiens
tacatttttacaggacaatttgggaatatctcc

SEQ ID NO: 37655 - DNA, 33 bp, Homo sapiens
ctgaatgcaggagataccagtttggttgtgtga

SEQ ID NO: 37656 - DNA, 33 bp, Homo sapiens
cccttttttcttatgaatagctctccactgact

SEQ ID NO: 37657 - DNA, 33 bp, Homo sapiens
tatctcatgcaactcactacttatgttcttata

SEQ ID NO: 37658 - DNA, 33 bp, Homo sapiens
agaaaaatcatgttaacggttgttgtctctagt

SEQ ID NO: 37659 - DNA, 33 bp, Homo sapiens
gtttgtccagcaaaaaacaagatatgtatctaa

SEQ ID NO: 37660 - DNA, 33 bp, Homo sapiens
tatgagcttttctttccaattgcacagcttctg

SEQ ID NO: 37661 - DNA, 33 bp, Homo sapiens
atgctaaaaccataagccaacacagaagaaaga

SEQ ID NO: 37662 - DNA, 33 bp, Homo sapiens
attaatttacttgtgacatctggcttagaagta

SEQ ID NO: 37663 - DNA, 33 bp, Homo sapiens
gtggtagttagctttccattcctgtgtaattca

SEQ ID NO: 37664 - DNA, 33 bp, Homo sapiens
attaagttaggatttcaaatgattacaagagat

SEQ ID NO: 37665 - DNA, 33 bp, Homo sapiens
ttttatccaacacttacagagatcctggatgtt

SEQ ID NO: 37666 - DNA, 33 bp, Homo sapiens
aatattgaacttttccactgacatagtttgaat

SEQ ID NO: 37667 - DNA, 33 bp, Homo sapiens
agttcacgttgtatcaaatagaacattgacacg

SEQ ID NO: 37668 - DNA, 33 bp, Homo sapiens
ataaattagaatcacaatagtagttatgattgt

SEQ ID NO: 37669 - DNA, 33 bp, Homo sapiens
cactgggtgcatagaagatttctgactgtcaaa

SEQ ID NO: 37670 - DNA, 33 bp, Homo sapiens
aactgtagccctagaacggcattggctgtacgt

SEQ ID NO: 37671 - DNA, 33 bp, Homo sapiens
caagcaggggcttacaatatatcaaaccataag

SEQ ID NO: 37672 - DNA, 33 bp, Homo sapiens
agagtttgaacctcaactcaggtaactcctgtg

SEQ ID NO: 37673 - DNA, 33 bp, Homo sapiens
gagcttaaaaaagaaacgtgaacacaggagtta

SEQ ID NO: 37674 - DNA, 33 bp, Homo sapiens
atgaattaatgttcaccgataaatctgaaatta

SEQ ID NO: 37675 - DNA, 33 bp, Homo sapiens
ggaaaactgaggtacaaaaggttatgtcatgta

SEQ ID NO: 37676 - DNA, 33 bp, Homo sapiens
ttttgtcgataaggaaaataatcagagtgggat

SEQ ID NO: 37677 - DNA, 33 bp, Homo sapiens
tatatcgtggaatacaaaatactgaaatacaaa

SEQ ID NO: 37678 - DNA, 33 bp, Homo sapiens
ggtcataccttaatagaactggtggttagaaaa

SEQ ID NO: 37679 - DNA, 33 bp, Homo sapiens
cttacctctggtgaaaagagaatgccatttgtt

SEQ ID NO: 37680 - DNA, 33 bp, Homo sapiens
cattgtaagagtacaacagcaagaccaaacatt

SEQ ID NO: 37681 - DNA, 33 bp, Homo sapiens
gttgttaatttcataccaccaacctactgtcta

SEQ ID NO: 37682 - DNA, 51 bp, Homo sapiens
cccctcacaatttattactcataagccatttatatcatttgcttccctgta

SEQ ID NO: 37683 - DNA, 33 bp, Homo sapiens
aggttgccaaaaactacgaaacaattcttgaca

SEQ ID NO: 37684 - DNA, 33 bp, Homo sapiens
tgtgaggacactaaaaaagccttacgaagattt

SEQ ID NO: 37685 - DNA, 33 bp, Homo sapiens
tggtgtccgtaacaaacgtcattttgaagtcat

SEQ ID NO: 37686 - DNA, 33 bp, Homo sapiens
atgtattttcaatatacgttacccaatccaaaa

SEQ ID NO: 37687 - DNA, 51 bp, Homo sapiens
ataatgcatgcatatgaatcacctacgaagatttgtgtcagacatttcata

SEQ ID NO: 37688 - DNA, 51 bp, Homo sapiens
tgtgatgatggaatttcagttataaggctgaatgaattgggaaaaataatt

SEQ ID NO: 37689 - DNA, 51 bp, Homo sapiens
gattttaggaggtacctgaaaactacgttaaatgaaaaactaaaatcagcg

SEQ ID NO: 37690 - DNA, 51 bp, Homo sapiens
ttttaaaaatagtggcaagggagataaattacttttaaatggctttctatg

SEQ ID NO: 37691 - DNA, 33 bp, Homo sapiens
gacaaaaatatctgctaacacttatgaacacat

SEQ ID NO: 37692 - DNA, 33 bp, Homo sapiens
ctgccttatatccctcaaatggcagagactatg

SEQ ID NO: 37693 - DNA, 33 bp, Homo sapiens
ttcgacagagtcaagaaccaagacagatacacg

SEQ ID NO: 37694 - DNA, 33 bp, Homo sapiens
ttagctcacctcaataagccacaaactatggtc

SEQ ID NO: 37695 - DNA, 33 bp, Homo sapiens
caaatctagcatatcacctgtttttataaagct

SEQ ID NO: 37696 - DNA, 33 bp, Homo sapiens
tgtctgatttatgtagcctaacagattggttca

SEQ ID NO: 37697 - DNA, 33 bp, Homo sapiens
agctggattccaactaaagcggtctctcaggta

SEQ ID NO: 37698 - DNA, 33 bp, Homo sapiens
ccttttgaatgaaagagcacactcaatggtcag

SEQ ID NO: 37699 - DNA, 51 bp, Homo sapiens
tggatctagcatttcaacccaggtccatctactttataatgatagaacaca

SEQ ID NO: 37700 - DNA, 33 bp, Homo sapiens
taagattctgaggaaactgtaagcaaaactcat

SEQ ID NO: 37701 - DNA, 33 bp, Homo sapiens
gagcctacttgcccaacttctgagatattatcg

SEQ ID NO: 37702 - DNA, 33 bp, Homo sapiens
ggttacaacaaatgaacatctgaactgatctct

SEQ ID NO: 37703 - DNA, 33 bp, Homo sapiens
tcaactcaatgagttgaaaaaaagtaataagac

SEQ ID NO: 37704 - DNA, 33 bp, Homo sapiens
gagagagtgctggcaacagaaaaggaaatgggc

SEQ ID NO: 37705 - DNA, 33 bp, Homo sapiens
taagagatgctctgtaaaagtcacatttgaaca

SEQ ID NO: 37706 - DNA, 33 bp, Homo sapiens
tataaccttctctacagtatacctcactatgat

SEQ ID NO: 37707 - DNA, 33 bp, Homo sapiens
aagggtccacaaaagacgtcaccatttggaaga

SEQ ID NO: 37708 - DNA, 33 bp, Homo sapiens
tttgctctgttgtatcaactctgttcctttgtc

SEQ ID NO: 37709 - DNA, 33 bp, Homo sapiens
cacatttccctttagacgcttattgatgccatt

SEQ ID NO: 37710 - DNA, 33 bp, Homo sapiens
tttttggcaccataatcataatcttctccatct

SEQ ID NO: 37711 - DNA, 33 bp, Homo sapiens
tgttatttcaactaaaatgattatctccgttag

SEQ ID NO: 37712 - DNA, 33 bp, Homo sapiens
taccctatgcttatacaacttgacccagcccct

SEQ ID NO: 37713 - DNA, 33 bp, Homo sapiens
tctagaaagagtagcaccttaattataatcatt

SEQ ID NO: 37714 - DNA, 33 bp, Homo sapiens
acaccatgtcttggcaacattcttattatttct

SEQ ID NO: 37715 - DNA, 33 bp, Homo sapiens
cctgagagataccagaatatggctggtgatatg

SEQ ID NO: 37716 - DNA, 33 bp, Homo sapiens
gattaaaatttatgaaccaattgtcatccaaaa

SEQ ID NO: 37717 - DNA, 33 bp, Homo sapiens
caaactttgtcattcaaacctgattcttttttg

SEQ ID NO: 37718 - DNA, 33 bp, Homo sapiens
ttcacaaatggtttctcaaacatggctatgtgt

SEQ ID NO: 37719 - DNA, 51 bp, Homo sapiens
tcttcctctctggctctaggcaccaaaactataagacaataaattcctgtt

SEQ ID NO: 37720 - DNA, 33 bp, Homo sapiens
gtttctaatggccttgcatggaacttcttcacc

SEQ ID NO: 37721 - DNA, 33 bp, Homo sapiens
ccaagatactggcttacgtttactctcaaattt

SEQ ID NO: 37722 - DNA, 33 bp, Homo sapiens
tactcatcagtaaaacagagctggtgatacttc

SEQ ID NO: 37723 - DNA, 33 bp, Homo sapiens
actcatggcaaacttgaaaaatctgtctttggt

SEQ ID NO: 37724 - DNA, 33 bp, Homo sapiens
gggcctgctatcagcccctgtgatttagagcat

SEQ ID NO: 37725 - DNA, 33 bp, Homo sapiens
ctacagttagttgttacgatcagatgtctgtaa

SEQ ID NO: 37726 - DNA, 33 bp, Homo sapiens
ctaccagtttgtacgacagatgactcctcctgg

SEQ ID NO: 37727 - DNA, 33 bp, Homo sapiens
gttggcaaacaaagaacagtcaacaactttctt

SEQ ID NO: 37728 - DNA, 33 bp, Homo sapiens
aataaaagaccccagactcaagtaacacttttt

SEQ ID NO: 37729 - DNA, 33 bp, Homo sapiens
atttactttagcagcaaaaccttatgttaaatg

SEQ ID NO: 37730 - DNA, 33 bp, Homo sapiens
tacatagtacttaacacaagagtgagaaggtgt

SEQ ID NO: 37731 - DNA, 33 bp, Homo sapiens
ctcctatggataggaacgttagctagttagccc

SEQ ID NO: 37732 - DNA, 33 bp, Homo sapiens
tgcttgccatgacaacaaaatttaatagaaata

SEQ ID NO: 37733 - DNA, 33 bp, Homo sapiens
gtagctgaaccaaacacggcattagcaaattga

SEQ ID NO: 37734 - DNA, 51 bp, Homo sapiens
gccaatatataagaaagtgtttaagcaagataaaacgcaaagtacatttta

SEQ ID NO: 37735 - DNA, 51 bp, Homo sapiens
ataatcttcctttccccataaagacaagcataatcaccaggagtgatattc

SEQ ID NO: 37736 - DNA, 33 bp, Homo sapiens
ttgcctgttccaatcaataaagctactaaaatg

SEQ ID NO: 37737 - DNA, 33 bp, Homo sapiens
atcttaatcctttcaaataatgcttctctcaat

SEQ ID NO: 37738 - DNA, 33 bp, Homo sapiens
tatatattacagcctacaggggataggatataa

SEQ ID NO: 37739 - DNA, 33 bp, Homo sapiens
gactgtgtgacataaaccctgacttgagtccag

SEQ ID NO: 37740 - DNA, 33 bp, Homo sapiens
tgtatcatcctctaaaagtgaaatatttcatca

SEQ ID NO: 37741 - DNA, 33 bp, Homo sapiens
gcaagaggcaatgagaacctggattaagtaagt

SEQ ID NO: 37742 - DNA, 33 bp, Homo sapiens
atcctttctatttttcaaacgtatatctcaccc

SEQ ID NO: 37743 - DNA, 33 bp, Homo sapiens
taaatccaagttataacgccggctacatacaga

SEQ ID NO: 37744 - DNA, 33 bp, Homo sapiens
ttagtgcagaacatctgaacacttttgggactt

SEQ ID NO: 37745 - DNA, 33 bp, Homo sapiens
tctgctatcagatagtcaaagacaaaacagcca

SEQ ID NO: 37746 - DNA, 33 bp, Homo sapiens
tccccatgtttttgtcactttagctgtttcttc

SEQ ID NO: 37747 - DNA, 33 bp, Homo sapiens
tagtcacattgctgtaccttagggctccagaac

SEQ ID NO: 37748 - DNA, 33 bp, Homo sapiens
ataacacataagaatccgacttgctttgtccat

SEQ ID NO: 37749 - DNA, 33 bp, Homo sapiens
agctcagaagattgcaaagttaagtagaaatga

SEQ ID NO: 37750 - DNA, 33 bp, Homo sapiens
ccatgaacaattttgaacagccaatgtgacatc

SEQ ID NO: 37751 - DNA, 33 bp, Homo sapiens
ttgtatgtgagaacataaggacctgcaagcaca

SEQ ID NO: 37752 - DNA, 33 bp, Homo sapiens
tcagaatgatagtaggaagagaggcatttccaa

SEQ ID NO: 37753 - DNA, 33 bp, Homo sapiens
agtgatggctattcacaggggacagtggtcact

SEQ ID NO: 37754 - DNA, 33 bp, Homo sapiens
ccatcctttctgagtacgaatgtgtggagataa

SEQ ID NO: 37755 - DNA, 33 bp, Homo sapiens
tatatacgtttgtccacgatctgtcctggctga

SEQ ID NO: 37756 - DNA, 33 bp, Homo sapiens
tgaaagaattgtaagcaaacaaaggacaagatt

SEQ ID NO: 37757 - DNA, 33 bp, Homo sapiens
ccctgcttggacgctacaccaaagtacacacag

SEQ ID NO: 37758 - DNA, 33 bp, Homo sapiens
tgacctcctgatattcacatgactttctcactt

SEQ ID NO: 37759 - DNA, 33 bp, Homo sapiens
cacttggctatacctacctgccagggaaactga

SEQ ID NO: 37760 - DNA, 51 bp, Homo sapiens
aactccacataagatactgtggacacatatttaaaacaaagttttttgttt

SEQ ID NO: 37761 - DNA, 33 bp, Homo sapiens
ttcttgaaaaaccatgaaaagtgcggccctagg

SEQ ID NO: 37762 - DNA, 33 bp, Homo sapiens
ggtggacaagtatgataaaaatttctgggtata

SEQ ID NO: 37763 - DNA, 33 bp, Homo sapiens
tgtaaaatttgaagcaaagtcaaagtcatatga

SEQ ID NO: 37764 - DNA, 33 bp, Homo sapiens
cagaaggccaggaatcacctctgctctaagccc

SEQ ID NO: 37765 - DNA, 33 bp, Homo sapiens
caaattttagagaagaagttaagggcaagatga

SEQ ID NO: 37766 - DNA, 33 bp, Homo sapiens
tgtgtagctttaaagacggtatttttggactag

SEQ ID NO: 37767 - DNA, 33 bp, Homo sapiens
tctctttaaaggcctgcagttcagatgcttgca

SEQ ID NO: 37768 - DNA, 51 bp, Homo sapiens
cctacctgtacccttttcggcttcaaaaactcctcagaaatgcactcacct

SEQ ID NO: 37769 - DNA, 51 bp, Homo sapiens
tactgtggcttttataactacaccacgactgaattattttagttgttatag

SEQ ID NO: 37770 - DNA, 33 bp, Homo sapiens
aaaataagattatgacgccctaaggtgttgtgg

SEQ ID NO: 37771 - DNA, 51 bp, Homo sapiens
cttaatttgctgtatgaagtacaaccgaggatgcctcacttcatgctgtat

SEQ ID NO: 37772 - DNA, 33 bp, Homo sapiens
ggttctgaactctaaaaatgctgtgctttaagt

SEQ ID NO: 37773 - DNA, 33 bp, Homo sapiens
tcaagtttaagcaaaacatgctgtctctatcaa

SEQ ID NO: 37774 - DNA, 33 bp, Homo sapiens
ttatatcttccaacaggattcagggctaggcaa

SEQ ID NO: 37775 - DNA, 33 bp, Homo sapiens
ttatgtgttgttaaacggttaaatgttcaatct

SEQ ID NO: 37776 - DNA, 51 bp, Homo sapiens
agctcaattatctttactaccttcgaaaatacagtatctctccacgtggga

SEQ ID NO: 37777 - DNA, 33 bp, Homo sapiens
gggcctgtactcagaaagaatcccatcaagaca

SEQ ID NO: 37778 - DNA, 33 bp, Homo sapiens
atgtctataaatgagcacaaaaggaaattaaaa

SEQ ID NO: 37779 - DNA, 33 bp, Homo sapiens
aacattatgagaatcaataacctgtacccttat

SEQ ID NO: 37780 - DNA, 33 bp, Homo sapiens
gcaaacaatcccattgaaaagtggacatgaaca

SEQ ID NO: 37781 - DNA, 33 bp, Homo sapiens
ggtgttgtacctaaaacgtctttgccaaagctg

SEQ ID NO: 37782 - DNA, 51 bp, Homo sapiens
agcaaatagacaaaaatatgcttaacgttgttcataataattaaaattact

SEQ ID NO: 37783 - DNA, 33 bp, Homo sapiens
cctctatctccacgaactcaattgatttaattt

SEQ ID NO: 37784 - DNA, 33 bp, Homo sapiens
aattatgaagtcaaataagtatcatgcatgagg

SEQ ID NO: 37785 - DNA, 33 bp, Homo sapiens
ctttcttaaatcactacaacctacaatcaacac

SEQ ID NO: 37786 - DNA, 33 bp, Homo sapiens
gaaatggcaaagctacaggaacaataaaattcc

SEQ ID NO: 37787 - DNA, 33 bp, Homo sapiens
aattattacaaagctaccgtatgggaaggcagt

SEQ ID NO: 37788 - DNA, 51 bp, Homo sapiens
aacttgacatttgctcggtctacatctgatcctaagggttccagataagat

SEQ ID NO: 37789 - DNA, 33 bp, Homo sapiens
gaatactcatttgcaactgttatgtgagaaaaa

SEQ ID NO: 37790 - DNA, 51 bp, Homo sapiens
acattaggtaggaatattgatggtaagatatcctgtatatggcctcatcag

SEQ ID NO: 37791 - DNA, 33 bp, Homo sapiens
cagattagattgtaaacgccacaagtgtggaaa

SEQ ID NO: 37792 - DNA, 33 bp, Homo sapiens
tgcagcacgaatatcagagcttccatatttgag

SEQ ID NO: 37793 - DNA, 33 bp, Homo sapiens
gtcctttgagaatttccatacattgtacaagtt

SEQ ID NO: 37794 - DNA, 33 bp, Homo sapiens
atgtaaaactaggaaacccaaatgcaacaagtg

SEQ ID NO: 37795 - DNA, 33 bp, Homo sapiens
acagaaataatgcacactccataatctcaaaca

SEQ ID NO: 37796 - DNA, 33 bp, Homo sapiens
actcaaatactgatgaccgctataaagacacat

SEQ ID NO: 37797 - DNA, 33 bp, Homo sapiens
aagaacagagtaattcacactcatttcttagat

SEQ ID NO: 37798 - DNA, 33 bp, Homo sapiens
catttattgcctatacaagagcctgaaacgatg

SEQ ID NO: 37799 - DNA, 33 bp, Homo sapiens
acaaagaaatataagacacagtttctgttttca

SEQ ID NO: 37800 - DNA, 51 bp, Homo sapiens
catagcccagagccaatctgtgcaacaggatatgtccttcagtgtatagcc

SEQ ID NO: 37801 - DNA, 33 bp, Homo sapiens
gaacggatgaatgtaaagatttccacaggaatt

SEQ ID NO: 37802 - DNA, 51 bp, Homo sapiens
aagatataaagcaataataaaaccagagtacacatttcttttggcaccttc

SEQ ID NO: 37803 - DNA, 33 bp, Homo sapiens
gatgcactaggatcgacgccaggttcagagaat

SEQ ID NO: 37804 - DNA, 33 bp, Homo sapiens
agggaaatggagatacacaattatcaaacagtc

SEQ ID NO: 37805 - DNA, 33 bp, Homo sapiens
taatagcaaagaataactaaaatcccaaactta

SEQ ID NO: 37806 - DNA, 33 bp, Homo sapiens
ataatatttagagaaaaaccatagctacagaag

SEQ ID NO: 37807 - DNA, 33 bp, Homo sapiens
gatttttctttgctcaccatggagagagctaaa

SEQ ID NO: 37808 - DNA, 33 bp, Homo sapiens
gctcaatattgctacaacgttgatgagaaaaat

SEQ ID NO: 37809 - DNA, 33 bp, Homo sapiens
catctcatggtaattacaaactctgattggctg

SEQ ID NO: 37810 - DNA, 51 bp, Homo sapiens
ttgaataaataccaaggagtgtgctagctagattgtatgttaagtgtatgt

SEQ ID NO: 37811 - DNA, 33 bp, Homo sapiens
tgtcagctctgacatcaattattccagggttct

SEQ ID NO: 37812 - DNA, 33 bp, Homo sapiens
ggctaaatgggggtacagatgagaaagtgaaag

SEQ ID NO: 37813 - DNA, 33 bp, Homo sapiens
tttttcacataagagccctgagacctccccagg

SEQ ID NO: 37814 - DNA, 33 bp, Homo sapiens
ttagtggctggccaggaagacgagttttggttg

SEQ ID NO: 37815 - DNA, 51 bp, Homo sapiens
tgccctaatccagctagctatagaaaataaggtcttacaattatagggtca

SEQ ID NO: 37816 - DNA, 33 bp, Homo sapiens
tcttggctcactgcaaacttagctcactgcaac

SEQ ID NO: 37817 - DNA, 33 bp, Homo sapiens
tttctctcaattaccacgtcccaattctagaga

SEQ ID NO: 37818 - DNA, 33 bp, Homo sapiens
cttaattatgtcgaggcccaacaacacatggta

SEQ ID NO: 37819 - DNA, 33 bp, Homo sapiens
ataccagtgtttctccagaagcaaatggagcac

SEQ ID NO: 37820 - DNA, 33 bp, Homo sapiens
gcccatcctactgtcacggtgacctcatctgtc

SEQ ID NO: 37821 - DNA, 33 bp, Homo sapiens
ttacaaatcttactaccatgctatctgtccaac

SEQ ID NO: 37822 - DNA, 33 bp, Homo sapiens
tggcttcaccgggttcaaggatgaaaatttcac

SEQ ID NO: 37823 - DNA, 33 bp, Homo sapiens
ccattcaagttaataaacgcagggctgggcatg

SEQ ID NO: 37824 - DNA, 33 bp, Homo sapiens
gggccagaaattgtcacgctcccaagcttgcac

SEQ ID NO: 37825 - DNA, 33 bp, Homo sapiens
tggtgaagctgggatcagaacctgtttagactt

SEQ ID NO: 37826 - DNA, 33 bp, Homo sapiens
tctggtgcacatagtacgagttgcgcttggcac

SEQ ID NO: 37827 - DNA, 33 bp, Homo sapiens
cttgccagccatgctacgatgcacacagatgtg

SEQ ID NO: 37828 - DNA, 33 bp, Homo sapiens
catatctcctgtctccaaaggccctccagtgtg

SEQ ID NO: 37829 - DNA, 33 bp, Homo sapiens
ttagtaattaggactcactttcagggccagtcc

SEQ ID NO: 37830 - DNA, 33 bp, Homo sapiens
aaagatatcacactgaaccattacactgatgac

SEQ ID NO: 37831 - DNA, 33 bp, Homo sapiens
gagtctggattctgtcgctttctgggcatatct

SEQ ID NO: 37832 - DNA, 51 bp, Homo sapiens
ggtggctacagagggaatagctaacagagtttcaggtgacagaaggaggag

SEQ ID NO: 37833 - DNA, 33 bp, Homo sapiens
catccaacaagtggccaccacactgctgggaca

SEQ ID NO: 37834 - DNA, 33 bp, Homo sapiens
ctagtaggtgctcaaaaaagccattcactcttt

SEQ ID NO: 37835 - DNA, 33 bp, Homo sapiens
gtcgtgtgtacaggccaagccccagtggcgtag

SEQ ID NO: 37836 - DNA, 33 bp, Homo sapiens
aggtcaaatgccagaaatgtgtcaccatcaaat

SEQ ID NO: 37837 - DNA, 33 bp, Homo sapiens
ctgctaatgtggacagcagactttatccctcct

SEQ ID NO: 37838 - DNA, 33 bp, Homo sapiens
ggatgccacagtgttaagtagagcagtgatacg

SEQ ID NO: 37839 - DNA, 33 bp, Homo sapiens
atctgaatgtgtgtcacggtattttttgtggaa

SEQ ID NO: 37840 - DNA, 33 bp, Homo sapiens
ggcaatgagtcagtaacgtggtgcagtggtcca

SEQ ID NO: 37841 - DNA, 33 bp, Homo sapiens
gcaactgtagtcccacacttgcttcttgtgctt

SEQ ID NO: 37842 - DNA, 33 bp, Homo sapiens
ggtgttctcacgttcacgttgtccttatgtaac

SEQ ID NO: 37843 - DNA, 33 bp, Homo sapiens
tttaaggtcagcatacccatacggctgcaatat

SEQ ID NO: 37844 - DNA, 33 bp, Homo sapiens
gcaacgaacttgataactggggtttagaagtag

SEQ ID NO: 37845 - DNA, 33 bp, Homo sapiens
agacttctaagctagcaattaagtgtattttct

SEQ ID NO: 37846 - DNA, 33 bp, Homo sapiens
caagcagtctgacttacgcacttaaccacagtt

SEQ ID NO: 37847 - DNA, 33 bp, Homo sapiens
aagaaattcactgtgaacaaacacacacacaca

SEQ ID NO: 37848 - DNA, 33 bp, Homo sapiens
gcagaccctgcaaacaatctatctcggagacag

SEQ ID NO: 37849 - DNA, 33 bp, Homo sapiens
aaaagttcttagggaacgtaatgtccatgagat

SEQ ID NO: 37850 - DNA, 33 bp, Homo sapiens
aacacgagtcacaatcagaacttatatatttac

SEQ ID NO: 37851 - DNA, 33 bp, Homo sapiens
cctatgagagggtacacgctaggaatttgagaa

SEQ ID NO: 37852 - DNA, 33 bp, Homo sapiens
tacttgcttgaatgtacagggatgatttatcga

SEQ ID NO: 37853 - DNA, 33 bp, Homo sapiens
ggtccctatgggctaccacaggacaagaagaac

SEQ ID NO: 37854 - DNA, 33 bp, Homo sapiens
atcaccatgatgtacaataatagatgtcttgaa

SEQ ID NO: 37855 - DNA, 33 bp, Homo sapiens
ccatttgttgaaaagaacattcttcctgcattt

SEQ ID NO: 37856 - DNA, 33 bp, Homo sapiens
tactcgctgcaagaaaaagagaagcaaaatagt

SEQ ID NO: 37857 - DNA, 33 bp, Homo sapiens
agggcagtgagcctcacgtggattctgtttcta

SEQ ID NO: 37858 - DNA, 33 bp, Homo sapiens
tcttaatgaggctactcaaaagcaggagaaaca

SEQ ID NO: 37859 - DNA, 33 bp, Homo sapiens
agtttatagataaggacatcaggaccgtcaatt

SEQ ID NO: 37860 - DNA, 33 bp, Homo sapiens
aatgtaatccaaatgcccagttatgggaaacta

SEQ ID NO: 37861 - DNA, 33 bp, Homo sapiens
tgaatgttaagctcaccgatcttggcctcaggt

SEQ ID NO: 37862 - DNA, 33 bp, Homo sapiens
gtactaactacactaacgcaaaatgccaaaatt

SEQ ID NO: 37863 - DNA, 33 bp, Homo sapiens
ccattctcctgtataacaaccccaatgccatca

SEQ ID NO: 37864 - DNA, 33 bp, Homo sapiens
ttgtgttatttggacgcccatttggaagaccat

SEQ ID NO: 37865 - DNA, 33 bp, Homo sapiens
agctgcttatatcaccagaagaaaagttttaca

SEQ ID NO: 37866 - DNA, 33 bp, Homo sapiens
agccttgctagaaagcacgaggttggcacatct

SEQ ID NO: 37867 - DNA, 33 bp, Homo sapiens
atggcggtgctgtgtcaaaacaaagctcccagg

SEQ ID NO: 37868 - DNA, 33 bp, Homo sapiens
tgtggaatggtggtaccgcaatggctacatgga

SEQ ID NO: 37869 - DNA, 33 bp, Homo sapiens
ttagggactgtgcatcacaccttattcagtact

SEQ ID NO: 37870 - DNA, 33 bp, Homo sapiens
caagagcactcaagtgaagaacacaaggcaagt

SEQ ID NO: 37871 - DNA, 33 bp, Homo sapiens
ggttctgatgatttgccatctgcagttatctgg

SEQ ID NO: 37872 - DNA, 33 bp, Homo sapiens
tcgccacatcctgagaatagccaacgtgtgggg

SEQ ID NO: 37873 - DNA, 33 bp, Homo sapiens
gctatgccagctatgaagtgccatgcagtcatc

SEQ ID NO: 37874 - DNA, 33 bp, Homo sapiens
gatctagcttcaacaacaatttataaggcacac

SEQ ID NO: 37875 - DNA, 33 bp, Homo sapiens
cagttccctgattgaactgtcacattgtcttaa

SEQ ID NO: 37876 - DNA, 33 bp, Homo sapiens
gatctaaggacatttccccgaaaccaggcaaaa

SEQ ID NO: 37877 - DNA, 33 bp, Homo sapiens
ggcaaaaagactctacacctgtaatagatgaaa

SEQ ID NO: 37878 - DNA, 33 bp, Homo sapiens
cctggctgactcaccacactaactgccctactc

SEQ ID NO: 37879 - DNA, 33 bp, Homo sapiens
cctgagcctgctgaaacgatagaaaatgcaatc

SEQ ID NO: 37880 - DNA, 33 bp, Homo sapiens
gtcacactactgacaactgccaggatttgaatc

SEQ ID NO: 37881 - DNA, 33 bp, Homo sapiens
tcatcttcagtttccccggacttagcagaggga

SEQ ID NO: 37882 - DNA, 33 bp, Homo sapiens
ttatagaagataccagccctggtcgcacacacc

SEQ ID NO: 37883 - DNA, 33 bp, Homo sapiens
gagaccaggtgacagcagcacttgaccattaca

SEQ ID NO: 37884 - DNA, 33 bp, Homo sapiens
cagaactatctgaagacagtctgatgtaattct

SEQ ID NO: 37885 - DNA, 33 bp, Homo sapiens
attcttgcctctgaaacatagtgatgagcccag

SEQ ID NO: 37886 - DNA, 33 bp, Homo sapiens
aggaagaatgacatccaaagggtgtggagcagc

SEQ ID NO: 37887 - DNA, 51 bp, Homo sapiens
aatgaaaatcagcagtctctaaataacttcaccagaacccaatccaaccag

SEQ ID NO: 37888 - DNA, 51 bp, Homo sapiens
agggacagccgcattaactttagaacctgctaagtgtacatattaaatcgt

SEQ ID NO: 37889 - DNA, 33 bp, Homo sapiens
tgctgaaacaggaagaatatcagattcaacaga

SEQ ID NO: 37890 - DNA, 33 bp, Homo sapiens
ggcatgtcttgaagcacgtactactgtgacttg

SEQ ID NO: 37891 - DNA, 33 bp, Homo sapiens
actggcatgtttctgacgttgctaggtgtgttt

SEQ ID NO: 37892 - DNA, 33 bp, Homo sapiens
gttagctgttcctttgcttggctacgtccatgt

SEQ ID NO: 37893 - DNA, 33 bp, Homo sapiens
ccctcttcctccaaaaagaaagtacacctaagg

SEQ ID NO: 37894 - DNA, 33 bp, Homo sapiens
tcttgtcgcagcttcaaagccctccaggtgtgc

SEQ ID NO: 37895 - DNA, 33 bp, Homo sapiens
tctgcagaaaggcaaaccataagttgtgatgac

SEQ ID NO: 37896 - DNA, 33 bp, Homo sapiens
aggcaaaaatctgctccataggttggactatcc

SEQ ID NO: 37897 - DNA, 33 bp, Homo sapiens
atatcaggctagaggacaataattttgagggtc

SEQ ID NO: 37898 - DNA, 33 bp, Homo sapiens
agcatagtggcataagcaacaaaccatttgcag

SEQ ID NO: 37899 - DNA, 33 bp, Homo sapiens
ttgcacatagctaagacaatgactgcccttatt

SEQ ID NO: 37900 - DNA, 51 bp, Homo sapiens
tcatctagaagcatcttattaaaaaggatcagaatttaatacagcaggatt

SEQ ID NO: 37901 - DNA, 33 bp, Homo sapiens
acagccttgcatattacggcctacagatcaaca

SEQ ID NO: 37902 - DNA, 33 bp, Homo sapiens
ttaccccaggacttccaaattgggagatcttgc

SEQ ID NO: 37903 - DNA, 33 bp, Homo sapiens
gagaaccaaagcactcactattacaaaggggcc

SEQ ID NO: 37904 - DNA, 51 bp, Homo sapiens
tgtaaacatctagacacacaatgtacgctaaatgtactactttaatttctt

SEQ ID NO: 37905 - DNA, 33 bp, Homo sapiens
atactaactgttaaagaatgatcctctacttat

SEQ ID NO: 37906 - DNA, 33 bp, Homo sapiens
gggaagcttggatcaacgaactgggcagcctta

SEQ ID NO: 37907 - DNA, 33 bp, Homo sapiens
aagatgcaaagaaacaaagtgcgaatcgaagtc

SEQ ID NO: 37908 - DNA, 33 bp, Homo sapiens
tcatttaactcttacaagataaagtagctatta

SEQ ID NO: 37909 - DNA, 33 bp, Homo sapiens
ttaagcccttatcatgcattgtagccaaaacct

SEQ ID NO: 37910 - DNA, 33 bp, Homo sapiens
ctgcaggacataaggaaagaatagcaactgata

SEQ ID NO: 37911 - DNA, 33 bp, Homo sapiens
gcacctactttatatcagacattgtgttggatg

SEQ ID NO: 37912 - DNA, 51 bp, Homo sapiens
ccccatgatcttctctcattaaacacttatttctggcaattaaacttattt

SEQ ID NO: 37913 - DNA, 51 bp, Homo sapiens
ctacactgatctgggagaaaattaacgaagtagcatcagtaatgtatataa

SEQ ID NO: 37914 - DNA, 51 bp, Homo sapiens
atatgtgcatgcgctcacacatacaagcataaatattttgggctctgtttc

SEQ ID NO: 37915 - DNA, 51 bp, Homo sapiens
aagtaatgggtcctggcaataactacggattttattttctttgttggtctt

SEQ ID NO: 37916 - DNA, 33 bp, Homo sapiens
gtaatgtcaggctgtaacatctgtgactgctgc

SEQ ID NO: 37917 - DNA, 33 bp, Homo sapiens
aaaggtgcaaatcataaaagagaaattgataaa

SEQ ID NO: 37918 - DNA, 33 bp, Homo sapiens
cttgggttggaccacagactgcttaagtcatct

SEQ ID NO: 37919 - DNA, 33 bp, Homo sapiens
aggctgttagtaagagaccttatattaatctgt

SEQ ID NO: 37920 - DNA, 33 bp, Homo sapiens
tttcccgtactgtagaaaactcatcagctcaga

SEQ ID NO: 37921 - DNA, 33 bp, Homo sapiens
tgatatcaggtaaacacacttgcttgtatttta

SEQ ID NO: 37922 - DNA, 33 bp, Homo sapiens
gtaaagatggatttaaaccactgtcatctcctg

SEQ ID NO: 37923 - DNA, 51 bp, Homo sapiens
cactggccattactgtttgtgggtagcttccccaaggcttctgaagagaag

SEQ ID NO: 37924 - DNA, 33 bp, Homo sapiens
taaatactgataataaacatgaatggcaagagt

SEQ ID NO: 37925 - DNA, 33 bp, Homo sapiens
accacttggtgcagcacgaaaatgttctagttc

SEQ ID NO: 37926 - DNA, 33 bp, Homo sapiens
gctctctctttgatacacttattgcctttcttt

SEQ ID NO: 37927 - DNA, 33 bp, Homo sapiens
tacctaactggtttgaaaactcacaaaaaacta

SEQ ID NO: 37928 - DNA, 33 bp, Homo sapiens
gcaattgcagactttaaaccagtttcagcagcg

SEQ ID NO: 37929 - DNA, 33 bp, Homo sapiens
accaaacatttgtcgaatattgaattaacactt

SEQ ID NO: 37930 - DNA, 33 bp, Homo sapiens
cttcacattgacattgaaggatgtgatgactat

SEQ ID NO: 37931 - DNA, 33 bp, Homo sapiens
ttgcagcactattcgcaatggcagagacagaat

SEQ ID NO: 37932 - DNA, 33 bp, Homo sapiens
gtcctgtgtgatacacggtcttccttagtcttt

SEQ ID NO: 37933 - DNA, 33 bp, Homo sapiens
agggctccacagaaaaactgaggaagccaaagg

SEQ ID NO: 37934 - DNA, 33 bp, Homo sapiens
ctatccacgcctgggaaaatgacctccaacttg

SEQ ID NO: 37935 - DNA, 33 bp, Homo sapiens
catgtcagcttggctaagtggaagcagatttcc

SEQ ID NO: 37936 - DNA, 33 bp, Homo sapiens
ccactgtgaaccttagaccatcatgcccatgtt

SEQ ID NO: 37937 - DNA, 51 bp, Homo sapiens
ggctatttcacaggaacctcagataaaatactttcccctaaagcctgctct

SEQ ID NO: 37938 - DNA, 51 bp, Homo sapiens
cttctagatctgtagaaacacatcaaagctttttaaatcctctatagccat

SEQ ID NO: 37939 - DNA, 33 bp, Homo sapiens
cagagtaggatgcttaaacaaagaaacagcttg

SEQ ID NO: 37940 - DNA, 33 bp, Homo sapiens
gttagtctacaccaaacaaattctgacccccaa

SEQ ID NO: 37941 - DNA, 51 bp, Homo sapiens
ttctctcctggccaccagcagaaaccgagtagagaataaactctcaggcta

SEQ ID NO: 37942 - DNA, 51 bp, Homo sapiens
ggtttaaatttcagtaagattttcaaggcagaatgagacttccggcaacta

SEQ ID NO: 37943 - DNA, 51 bp, Homo sapiens
atgtttctctcctgagctaaaggtacccactgaggaaaggaattttgtggt

SEQ ID NO: 37944 - DNA, 33 bp, Homo sapiens
ggtccactttgaacacaatgaaaacaggacaag

SEQ ID NO: 37945 - DNA, 33 bp, Homo sapiens
gactggcaggataatcaagaactagttagaatc

SEQ ID NO: 37946 - DNA, 33 bp, Homo sapiens
gttattttatctggtccacaaaacaaaccaaca

SEQ ID NO: 37947 - DNA, 51 bp, Homo sapiens
cttcccagagagacgaattcagggaagttgctccacggtggctccgaccca

SEQ ID NO: 37948 - DNA, 33 bp, Homo sapiens
ctgagattcttaccagaaaacccagagaagccc

SEQ ID NO: 37949 - DNA, 33 bp, Homo sapiens
ctgctggtccaggagcacacttggagaaccact

SEQ ID NO: 37950 - DNA, 33 bp, Homo sapiens
agagctggcacaaccacagcacctctctaccca

SEQ ID NO: 37951 - DNA, 33 bp, Homo sapiens
ggcttgtgaggaaggccaaccataccatgaaag

SEQ ID NO: 37952 - DNA, 33 bp, Homo sapiens
ttgtgtagagtaggtaacattgcatccattttc

SEQ ID NO: 37953 - DNA, 33 bp, Homo sapiens
attattttttgaagtacgtcaatggagtatttt

SEQ ID NO: 37954 - DNA, 33 bp, Homo sapiens
gcccattccagtggaaaagaagtgctactttgg

SEQ ID NO: 37955 - DNA, 33 bp, Homo sapiens
tagtcctagagtagaaccatgctgtaaaataga

SEQ ID NO: 37956 - DNA, 33 bp, Homo sapiens
aaggaattttagcttacgaaagcaatcagagaa

SEQ ID NO: 37957 - DNA, 33 bp, Homo sapiens
ccaacaatgctgtggacctaacaagagaagaag

SEQ ID NO: 37958 - DNA, 33 bp, Homo sapiens
aactgccctctagccacgagagttactacaatt

SEQ ID NO: 37959 - DNA, 51 bp, Homo sapiens
actgaatatgttatagggatagaaaataatgacagagaaaaaacaaaatta

SEQ ID NO: 37960 - DNA, 33 bp, Homo sapiens
tcttcttgttctgaaacgccataaagagccagc

SEQ ID NO: 37961 - DNA, 33 bp, Homo sapiens
ctgatcataatttcccaaatctctcgctccatt

SEQ ID NO: 37962 - DNA, 33 bp, Homo sapiens
aacactagggccataactagtattcataaatgt

SEQ ID NO: 37963 - DNA, 33 bp, Homo sapiens
ccagtgaagagtgacagcaaaaatcatagctga

SEQ ID NO: 37964 - DNA, 33 bp, Homo sapiens
gctcctagaactcttgaaacactttcatgcctt

SEQ ID NO: 37965 - DNA, 51 bp, Homo sapiens
ttaagattaaataaaggactttctactaatcaagagtgattggtttttctt

SEQ ID NO: 37966 - DNA, 51 bp, Homo sapiens
ccaaacagcacatgattattcgtcaaacagtttcgtattccagatactgga

SEQ ID NO: 37967 - DNA, 33 bp, Homo sapiens
atggacgttatcaaggacagctgccggcactct

SEQ ID NO: 37968 - DNA, 33 bp, Homo sapiens
agctacaaattttccaaagaatgtctacatgta

SEQ ID NO: 37969 - DNA, 33 bp, Homo sapiens
tagtttccacttatgcaaggcactgtacctaaa

SEQ ID NO: 37970 - DNA, 33 bp, Homo sapiens
ttcctgtaagcaagaactggcaagtaacaattc

SEQ ID NO: 37971 - DNA, 33 bp, Homo sapiens
gtactttagcgatatccatgagacatctaggtg

SEQ ID NO: 37972 - DNA, 33 bp, Homo sapiens
ctctagattggggacacagggttatcatttttc

SEQ ID NO: 37973 - DNA, 51 bp, Homo sapiens
attccagtagagtaaattcataacaatgtaagcagccttatccagaaacag

SEQ ID NO: 37974 - DNA, 33 bp, Homo sapiens
tctgtagaaagctataaaagaagtcaaggtaag

SEQ ID NO: 37975 - DNA, 33 bp, Homo sapiens
aatgatatgactcatgaaaagtgattagttcac

SEQ ID NO: 37976 - DNA, 33 bp, Homo sapiens
acaaattagtagacaaagctaatgcaccaaaaa

SEQ ID NO: 37977 - DNA, 33 bp, Homo sapiens
tcttaagtgtctgctacgatcttaatatgtctc

SEQ ID NO: 37978 - DNA, 33 bp, Homo sapiens
attaggaatgagactcaagccatataaagtcaa

SEQ ID NO: 37979 - DNA, 33 bp, Homo sapiens
gaaagccagcctacaaagtcagcatgaaatcac

SEQ ID NO: 37980 - DNA, 33 bp, Homo sapiens
agactattttgtcatagagttggtaaggcttat

SEQ ID NO: 37981 - DNA, 33 bp, Homo sapiens
gattccaaagtgacctaaaggaaattcgaattt

SEQ ID NO: 37982 - DNA, 33 bp, Homo sapiens
caataacaacaacacaatcccaatggcattttc

SEQ ID NO: 37983 - DNA, 33 bp, Homo sapiens
tctttcaaaagttgagaacacaagaatgcagca

SEQ ID NO: 37984 - DNA, 33 bp, Homo sapiens
tcagtctaactcctacacattctttaaggattc

SEQ ID NO: 37985 - DNA, 51 bp, Homo sapiens
taatggttccgtatgtaccaacttgcaaaaagcggaaaatctattcatgga

SEQ ID NO: 37986 - DNA, 51 bp, Homo sapiens
aacctaaagcatatgtagttaaatacattagaagtcaagccctgattaatt

SEQ ID NO: 37987 - DNA, 51 bp, Homo sapiens
cataaaaatacaggttaattaaacaaaaatggtcagtgagggagtgaatgg

SEQ ID NO: 37988 - DNA, 51 bp, Homo sapiens
gacactgcatgataacttacgaattatatattgcaagttatggatgataac

SEQ ID NO: 37989 - DNA, 51 bp, Homo sapiens
catatcccatctcattccaaaaatcagcttactggtaacttctttcaatac

SEQ ID NO: 37990 - DNA, 33 bp, Homo sapiens
gactccagaagaagggcagcagctgttggagat

SEQ ID NO: 37991 - DNA, 33 bp, Homo sapiens
ttgcctattgctaatagagtaaaagccacaata

SEQ ID NO: 37992 - DNA, 33 bp, Homo sapiens
tgctcaatctcagggaactgtcaaatggttctg

SEQ ID NO: 37993 - DNA, 33 bp, Homo sapiens
ttttaacacaggtggaatatcagaaaaatgtag

SEQ ID NO: 37994 - DNA, 51 bp, Homo sapiens
tatgagccccactgtggatctgtacatttccttagggcattggagcttcag

SEQ ID NO: 37995 - DNA, 33 bp, Homo sapiens
ctgtcttaattactcaatgactgttcaaagaaa

SEQ ID NO: 37996 - DNA, 33 bp, Homo sapiens
agatgatgcatttctcagaatgtgtccccacat

SEQ ID NO: 37997 - DNA, 33 bp, Homo sapiens
tacttttagcagtcacagaccccaagcccaaac

SEQ ID NO: 37998 - DNA, 51 bp, Homo sapiens
agatcgcataatttagtttagaataaagagatcttgtcacctttcctctaa

SEQ ID NO: 37999 - DNA, 33 bp, Homo sapiens
aaagatatgtacatcaacattggataactgggc

SEQ ID NO: 38000 - DNA, 33 bp, Homo sapiens
ttattatttgacagtacagtatggagactacag

SEQ ID NO: 38001 - DNA, 33 bp, Homo sapiens
ccactctggtttataaaatacctgaaatacctg

SEQ ID NO: 38002 - DNA, 33 bp, Homo sapiens
gagtactattacaaagaaagtgaccagatttga

SEQ ID NO: 38003 - DNA, 51 bp, Homo sapiens
ctctacatgtagatataggtattaacataagcatatgtgtaacatatatgt

SEQ ID NO: 38004 - DNA, 33 bp, Homo sapiens
gacaatacggcatttacctaccacaggcaatga

SEQ ID NO: 38005 - DNA, 33 bp, Homo sapiens
gtaaccacaagcctaaactgcatatgaagagca

SEQ ID NO: 38006 - DNA, 33 bp, Homo sapiens
attgtattatattaagccaaaggtgtatattgt

SEQ ID NO: 38007 - DNA, 33 bp, Homo sapiens
cagtctttctctgtaaatctctatacggagtgc

SEQ ID NO: 38008 - DNA, 33 bp, Homo sapiens
aagggcagacattttacgtgtttgctaaaatcc

SEQ ID NO: 38009 - DNA, 33 bp, Homo sapiens
cacccttacaggaagaccttaatgacagaacat

SEQ ID NO: 38010 - DNA, 33 bp, Homo sapiens
gagtaattgaaatcacaggaatggatgagactc

SEQ ID NO: 38011 - DNA, 33 bp, Homo sapiens
ctaaaagctcgtagccagcaatttccctgccaa

SEQ ID NO: 38012 - DNA, 33 bp, Homo sapiens
ggatgaatagtctacaaagcaaactccttccat

SEQ ID NO: 38013 - DNA, 33 bp, Homo sapiens
catagaaccaattgaaatcagtctgctttttat

SEQ ID NO: 38014 - DNA, 33 bp, Homo sapiens
aaaggactagagataacgcaagtaaatctgaca

SEQ ID NO: 38015 - DNA, 33 bp, Homo sapiens
gcagctctatcttgagactaggactggtgagat

SEQ ID NO: 38016 - DNA, 51 bp, Homo sapiens
ttattctccattctccacttcgtacaccacatatacataagagttttcaaa

SEQ ID NO: 38017 - DNA, 51 bp, Homo sapiens
ctccttcaatgtctgtgagaagaagcctgaagggtgagctaagtccatcca

SEQ ID NO: 38018 - DNA, 51 bp, Homo sapiens
ggtttctgactttggcaagttgctccatctctccaagactgtttttggaat

SEQ ID NO: 38019 - DNA, 33 bp, Homo sapiens
acgtggtgattgtccacgacatggcaaagtggt

SEQ ID NO: 38020 - DNA, 33 bp, Homo sapiens
gggacctgcaagagaactgatctgtgctggcac

SEQ ID NO: 38021 - DNA, 33 bp, Homo sapiens
aggaattcagcccagaaaagagtcagtcagaaa

SEQ ID NO: 38022 - DNA, 33 bp, Homo sapiens
ttggtgaagtattatccgaagtcaaaaagcagg

SEQ ID NO: 38023 - DNA, 33 bp, Homo sapiens
ctagagtgtgtctgcactaagatcactggagcc

SEQ ID NO: 38024 - DNA, 33 bp, Homo sapiens
gtggctaaaaatcacaatgtctttgatgtactt

SEQ ID NO: 38025 - DNA, 33 bp, Homo sapiens
aatctagttcacaatgcatgagcctttctctgc

SEQ ID NO: 38026 - DNA, 33 bp, Homo sapiens
ttttttgctacccaaacgactgtggattaagag

SEQ ID NO: 38027 - DNA, 33 bp, Homo sapiens
aagatgcttggcatcaaccaaagtgaccaatga

SEQ ID NO: 38028 - DNA, 33 bp, Homo sapiens
gctgtgcagccttggaaaagttgcataacctct

SEQ ID NO: 38029 - DNA, 33 bp, Homo sapiens
aaagtttattttgccaatctcttaactacctat

SEQ ID NO: 38030 - DNA, 51 bp, Homo sapiens
ggtccctggacggagaatccagtatcggtggcccactggctcctgctggcc

SEQ ID NO: 38031 - DNA, 33 bp, Homo sapiens
ttggaatggtcaaaaactagaagcccaggtggt

SEQ ID NO: 38032 - DNA, 33 bp, Homo sapiens
ccagtaatcttccttcaaattcatgaaacactg

SEQ ID NO: 38033 - DNA, 33 bp, Homo sapiens
aaagaaaatctgtctacagtgctgaagcagcta

SEQ ID NO: 38034 - DNA, 33 bp, Homo sapiens
tgatattcctgcccagaaacttaagaactgccc

SEQ ID NO: 38035 - DNA, 33 bp, Homo sapiens
acattcttaaaagccaatgctacagtgggaatg

SEQ ID NO: 38036 - DNA, 33 bp, Homo sapiens
acacactgggactaccactgctctgtgagacaa

SEQ ID NO: 38037 - DNA, 33 bp, Homo sapiens
tcccagacctccacaccattagtccacgtgaat

SEQ ID NO: 38038 - DNA, 51 bp, Homo sapiens
agatggcactcctctagtcatctcacatcccaagtcttctcagaccccacc

SEQ ID NO: 38039 - DNA, 33 bp, Homo sapiens
gtatgaccagagctgaaaacagattatgtgaaa

SEQ ID NO: 38040 - DNA, 33 bp, Homo sapiens
tgctcttgatcatggacaaatagcaattctacc

SEQ ID NO: 38041 - DNA, 33 bp, Homo sapiens
ccctcaaggtcataaagtcccaactggtcatta

SEQ ID NO: 38042 - DNA, 33 bp, Homo sapiens
taccccagcctttaccactatgcaatataggca

SEQ ID NO: 38043 - DNA, 33 bp, Homo sapiens
caaaagcacgggtaaccaatgcaaaaattgata

SEQ ID NO: 38044 - DNA, 33 bp, Homo sapiens
tgactggaatcaattacctagcaaacaatttgg

SEQ ID NO: 38045 - DNA, 33 bp, Homo sapiens
tcaaaattcacttaccaatattgatcagactct

SEQ ID NO: 38046 - DNA, 33 bp, Homo sapiens
ctgaaatccaggcttccagacttttccttgcct

SEQ ID NO: 38047 - DNA, 33 bp, Homo sapiens
ggttgtggagaaaaaacaacgcttatacacaat

SEQ ID NO: 38048 - DNA, 33 bp, Homo sapiens
gagaatttgcaaagaacgggagacacccttatt

SEQ ID NO: 38049 - DNA, 33 bp, Homo sapiens
atagtccagaagggaaaatagattattgtatta

SEQ ID NO: 38050 - DNA, 33 bp, Homo sapiens
aacaaacaaacaaaaacctgatcttgcaatttg

SEQ ID NO: 38051 - DNA, 33 bp, Homo sapiens
agctagttgaagaatacgattgccttacaaatg

SEQ ID NO: 38052 - DNA, 33 bp, Homo sapiens
ctccttttcattaaaaatggcccagcagggact

SEQ ID NO: 38053 - DNA, 33 bp, Homo sapiens
agtgctgaagtgctgactagcggtgttcctaat

SEQ ID NO: 38054 - DNA, 33 bp, Homo sapiens
ctcagaaggcaagccagactcattaggtcatag

SEQ ID NO: 38055 - DNA, 33 bp, Homo sapiens
actttacttaagctctaactaaaggaagcatct

SEQ ID NO: 38056 - DNA, 33 bp, Homo sapiens
aggaatctgacaaggacgagagaattctggctt

SEQ ID NO: 38057 - DNA, 33 bp, Homo sapiens
attcttgagagacgaccccaggaaaaggtcaat

SEQ ID NO: 38058 - DNA, 33 bp, Homo sapiens
ttctgcccaaccattcacttatctgtccgcaca

SEQ ID NO: 38059 - DNA, 51 bp, Homo sapiens
gatccaattaagacttgggtcccctgagataatgagtggaagagtgtggtg

SEQ ID NO: 38060 - DNA, 33 bp, Homo sapiens
ggtggcttttctaaccagggggaatagcttcag

SEQ ID NO: 38061 - DNA, 33 bp, Homo sapiens
ggagtttctaaaagtcaaaattgcacaaagaga

SEQ ID NO: 38062 - DNA, 33 bp, Homo sapiens
cagaaagacaaccatacccggaatctggtccgg

SEQ ID NO: 38063 - DNA, 33 bp, Homo sapiens
gtcgctgcagatgtggcatttctctcccaaaga

SEQ ID NO: 38064 - DNA, 33 bp, Homo sapiens
ctctgagctatcagtcacaatgcaagagggagc

SEQ ID NO: 38065 - DNA, 33 bp, Homo sapiens
gaaaggtctttgagaacaggaattggtccatga

SEQ ID NO: 38066 - DNA, 33 bp, Homo sapiens
ccggttctgtcccaccaaaactattagatgtca

SEQ ID NO: 38067 - DNA, 33 bp, Homo sapiens
ttgttctcttggcccgcagtatgtacctccctg

SEQ ID NO: 38068 - DNA, 33 bp, Homo sapiens
agatacaggaaacccaatgaacccaaagcacag

SEQ ID NO: 38069 - DNA, 33 bp, Homo sapiens
aagtattttgggaagaaatggcaaatccatatc

SEQ ID NO: 38070 - DNA, 33 bp, Homo sapiens
aagaggaaaattgatacactgtcatctgtttta

SEQ ID NO: 38071 - DNA, 33 bp, Homo sapiens
cttcttcacagtttcacagatagatttattctt

SEQ ID NO: 38072 - DNA, 33 bp, Homo sapiens
ctctgtttctctgggcaagcagaaagcaaaagg

SEQ ID NO: 38073 - DNA, 33 bp, Homo sapiens
gtgagtatagcattgaagttctaaacagcccta

SEQ ID NO: 38074 - DNA, 33 bp, Homo sapiens
agtttttatccattcaaaccccctcaatctggc

SEQ ID NO: 38075 - DNA, 33 bp, Homo sapiens
gaacatctcctctgctgaagtacttgagggtag

SEQ ID NO: 38076 - DNA, 33 bp, Homo sapiens
ttctgtatctgctaaactggaaggactgccctt

SEQ ID NO: 38077 - DNA, 33 bp, Homo sapiens
cctggggtaccgggtgaaagagattgtgctcag

SEQ ID NO: 38078 - DNA, 33 bp, Homo sapiens
tatgagtcatgcctaccggcccgaggctgcctc

SEQ ID NO: 38079 - DNA, 33 bp, Homo sapiens
gagtgctcaattgcgcaccatatttatatattg

SEQ ID NO: 38080 - DNA, 33 bp, Homo sapiens
gtgagacagcaatgaacagaacaggcaaggtcc

SEQ ID NO: 38081 - DNA, 33 bp, Homo sapiens
cagagcctcagagtggaaggtgttggtatttgc

SEQ ID NO: 38082 - DNA, 51 bp, Homo sapiens
ttgttatctctgggtagcaggattacagagcattttctttttaagaatatt

SEQ ID NO: 38083 - DNA, 33 bp, Homo sapiens
gatttagtgcccatgacgatgatgaattattag

SEQ ID NO: 38084 - DNA, 33 bp, Homo sapiens
ctctctccagctaaaagatcaggaaaagggcag

SEQ ID NO: 38085 - DNA, 33 bp, Homo sapiens
ctcgttctttttcacggccatgtagattccata

SEQ ID NO: 38086 - DNA, 33 bp, Homo sapiens
aaaaaatcaaacctgaatataatgacatctgta

SEQ ID NO: 38087 - DNA, 33 bp, Homo sapiens
agttatattgagaatacagaacactgttcatac

SEQ ID NO: 38088 - DNA, 33 bp, Homo sapiens
caccaaaatgcctcataacgtttactaaatagt

SEQ ID NO: 38089 - DNA, 33 bp, Homo sapiens
gaatgagcagaataaaccacctgaagtataaaa

SEQ ID NO: 38090 - DNA, 33 bp, Homo sapiens
aaccccacaatattaaatcaatgtaattcacca

SEQ ID NO: 38091 - DNA, 33 bp, Homo sapiens
acataaaatatgctaaaaataatgacagttgat

SEQ ID NO: 38092 - DNA, 33 bp, Homo sapiens
gtgcaaaacagtatcgaatgttgcatgcaaatc

SEQ ID NO: 38093 - DNA, 33 bp, Homo sapiens
ggaaagagttggaccaagtatctaatactccaa

SEQ ID NO: 38094 - DNA, 33 bp, Homo sapiens
ttgatatcactgagtccctgtggcacaactcat

SEQ ID NO: 38095 - DNA, 33 bp, Homo sapiens
tacttgatcctggttacgaatagtcagcttgtt

SEQ ID NO: 38096 - DNA, 33 bp, Homo sapiens
acattatgaggaagaagatgaaactcaaaggta

SEQ ID NO: 38097 - DNA, 33 bp, Homo sapiens
gggataggctagatcaaagatgccagggagaga

SEQ ID NO: 38098 - DNA, 33 bp, Homo sapiens
gaaatagtctataaaacgaagcggcagtaggag

SEQ ID NO: 38099 - DNA, 51 bp, Homo sapiens
agaaagagggaattatctcctggagcagttcgtaaagcatactgttttatg

SEQ ID NO: 38100 - DNA, 33 bp, Homo sapiens
attattgtccaaagaaaataccagcatgatgca

SEQ ID NO: 38101 - DNA, 33 bp, Homo sapiens
gttttcagtgacatccagaggctgttttaccag

SEQ ID NO: 38102 - DNA, 33 bp, Homo sapiens
gtaggaggatcaagcaatgaacttggtagtgaa

SEQ ID NO: 38103 - DNA, 33 bp, Homo sapiens
attgagaaactaggccgatctattgtgagcagc

SEQ ID NO: 38104 - DNA, 33 bp, Homo sapiens
gttggcctctagtaaacacctcatccatcaagc

SEQ ID NO: 38105 - DNA, 33 bp, Homo sapiens
gattcaggccagtaatcagaatgaagtttgggg

SEQ ID NO: 38106 - DNA, 33 bp, Homo sapiens
gttgtaggtgtcattacgtgtgactgtcatagt

SEQ ID NO: 38107 - DNA, 33 bp, Homo sapiens
ctgcctgaaacccagcactaggtagtgtagcca

SEQ ID NO: 38108 - DNA, 33 bp, Homo sapiens
cccacctgcaatgcccaaatgagcagcggctcc

SEQ ID NO: 38109 - DNA, 33 bp, Homo sapiens
atcatcggaagtacacacagtctcagacacaaa

SEQ ID NO: 38110 - DNA, 33 bp, Homo sapiens
atcctgaggttctccccatcctacaccatgtcc

SEQ ID NO: 38111 - DNA, 33 bp, Homo sapiens
tggtttctagtcctctcaacccatcaaggtgga

SEQ ID NO: 38112 - DNA, 33 bp, Homo sapiens
aggtcaggaaccctgcaacatactctcttctcc

SEQ ID NO: 38113 - DNA, 33 bp, Homo sapiens
aaaagttgacactgataacaataaagcttttct

SEQ ID NO: 38114 - DNA, 33 bp, Homo sapiens
tcacaggaccaagcacaatgccttgcacaaagc

SEQ ID NO: 38115 - DNA, 33 bp, Homo sapiens
ctttatttttttatccacagtgtacatcatata

SEQ ID NO: 38116 - DNA, 51 bp, Homo sapiens
tcagttgttctttttctgtcttccccattatcagcagctgttataagccct

SEQ ID NO: 38117 - DNA, 33 bp, Homo sapiens
caccacattctcagtgcaccgtgacttccttcc

SEQ ID NO: 38118 - DNA, 33 bp, Homo sapiens
ggagatggctacacaaatgtgaaaggatggttg

SEQ ID NO: 38119 - DNA, 33 bp, Homo sapiens
ctccaccagaaaccacaaaggctaatgttctag

SEQ ID NO: 38120 - DNA, 33 bp, Homo sapiens
ttttgaagactgtttcactcacatggttgccac

SEQ ID NO: 38121 - DNA, 33 bp, Homo sapiens
accgagtgagccttccggcaattgactaatgtg

SEQ ID NO: 38122 - DNA, 33 bp, Homo sapiens
atacagattataaggaaagcaataagtaatgtg

SEQ ID NO: 38123 - DNA, 33 bp, Homo sapiens
tagttacaggtccaacagagttcactctaagac

SEQ ID NO: 38124 - DNA, 33 bp, Homo sapiens
tttctttctcggtgacagtaggagtggaaatga

SEQ ID NO: 38125 - DNA, 33 bp, Homo sapiens
tgttcacctctttaaccgcaactgaatggatca

SEQ ID NO: 38126 - DNA, 33 bp, Homo sapiens
agaaactgtttacaacaaattagagactgggta

SEQ ID NO: 38127 - DNA, 33 bp, Homo sapiens
ccactgctgtaaataacagtgaagtgaataccc

SEQ ID NO: 38128 - DNA, 33 bp, Homo sapiens
cgcactgacagcctccacgatgggaagatcaca

SEQ ID NO: 38129 - DNA, 51 bp, Homo sapiens
aggtactaggagggtcagagagaaacgcctgcttacctctaggaattggtc

SEQ ID NO: 38130 - DNA, 33 bp, Homo sapiens
ttctctgaaccccagactcatttatccagctca

SEQ ID NO: 38131 - DNA, 33 bp, Homo sapiens
ggaagggaaatcatacagctctaggctctaact

SEQ ID NO: 38132 - DNA, 33 bp, Homo sapiens
tagggcagtggtcttaaaagggaatttgccaga

SEQ ID NO: 38133 - DNA, 33 bp, Homo sapiens
cgcatcctgatattccaacagagtcctgacttc

SEQ ID NO: 38134 - DNA, 33 bp, Homo sapiens
actttgtttctctgtaaatttcccaaccatatg

SEQ ID NO: 38135 - DNA, 33 bp, Homo sapiens
caatatgtaagtaaatcagtacagttgcgtgcc

SEQ ID NO: 38136 - DNA, 33 bp, Homo sapiens
cactttagaaaaccggcagtgtctcctaaagct

SEQ ID NO: 38137 - DNA, 33 bp, Homo sapiens
agttcctactctctagacatggcttccttctcc

SEQ ID NO: 38138 - DNA, 33 bp, Homo sapiens
gtgacatattgatgtcaacctgaatattcagaa

SEQ ID NO: 38139 - DNA, 51 bp, Homo sapiens
acaggttttagggtagagaagaaggcaaaatgcaagcagatttatgtctat

SEQ ID NO: 38140 - DNA, 33 bp, Homo sapiens
tggatttctatagaacagcataatgccatgctt

SEQ ID NO: 38141 - DNA, 33 bp, Homo sapiens
tttgttatttttttgacgctacttcctaatttt

SEQ ID NO: 38142 - DNA, 33 bp, Homo sapiens
ataaaaagcagtgataaccaggttgtgtactgt

SEQ ID NO: 38143 - DNA, 33 bp, Homo sapiens
ttatgcatctggtatcaaataaaaattggaaag

SEQ ID NO: 38144 - DNA, 33 bp, Homo sapiens
ttagctggctttgaacaagttctctcttggaat

SEQ ID NO: 38145 - DNA, 33 bp, Homo sapiens
aacagacaccaggaccaccataccacacactgc

SEQ ID NO: 38146 - DNA, 33 bp, Homo sapiens
aaacacatagatggtaaataaaggagataaggt

SEQ ID NO: 38147 - DNA, 33 bp, Homo sapiens
tttcttggtctagcaaaaaatcattggtgagaa

SEQ ID NO: 38148 - DNA, 51 bp, Homo sapiens
ttgtagcacatggagagccctcgtgaagagcaaaaaactttttgtaaattt

SEQ ID NO: 38149 - DNA, 33 bp, Homo sapiens
ggtggatcctctgtaaggcagagcaacatgatt

SEQ ID NO: 38150 - DNA, 33 bp, Homo sapiens
gctaacaacctaagatcaacccaagacccaaga

SEQ ID NO: 38151 - DNA, 33 bp, Homo sapiens
catatctagtggatagcagagtcggcaattaac

SEQ ID NO: 38152 - DNA, 33 bp, Homo sapiens
gttgaaataaggagcacagggcctttatccaca

SEQ ID NO: 38153 - DNA, 33 bp, Homo sapiens
tagattagatgattccccaatgtccctttcaac

SEQ ID NO: 38154 - DNA, 33 bp, Homo sapiens
gaattttccagtgaagcacaggtctatctaaga

SEQ ID NO: 38155 - DNA, 33 bp, Homo sapiens
cagaggatgactttgaaaccttgaggctcagct

SEQ ID NO: 38156 - DNA, 33 bp, Homo sapiens
acattgccctggttgccctccggtttgaaacaa

SEQ ID NO: 38157 - DNA, 33 bp, Homo sapiens
tacagcatttgatacacaatatggatttctcct

SEQ ID NO: 38158 - DNA, 51 bp, Homo sapiens
tgctgttcatctcatgcccataaatgaataaaccggtgatcagcaaatcag

SEQ ID NO: 38159 - DNA, 33 bp, Homo sapiens
gggctgtagaagggtacaggtccaacttctgta

SEQ ID NO: 38160 - DNA, 33 bp, Homo sapiens
tatatttatgtcctgccgattgagtatattcat

SEQ ID NO: 38161 - DNA, 51 bp, Homo sapiens
agaacaaatgaaggcactccaggtaacgagttcagtgtagtcagaggcaaa

SEQ ID NO: 38162 - DNA, 33 bp, Homo sapiens
cagcactctttgaggacagttagatagtatttg

SEQ ID NO: 38163 - DNA, 33 bp, Homo sapiens
attgtagtccccaaaaattctgatcaaccaaat

SEQ ID NO: 38164 - DNA, 33 bp, Homo sapiens
ccatttagacaagcgcaattctgaaaatgatgc

SEQ ID NO: 38165 - DNA, 33 bp, Homo sapiens
ccaaggctatattgaaatctctttggtccagtt

SEQ ID NO: 38166 - DNA, 33 bp, Homo sapiens
tagaatgaacgaatgaaccctcgctaaaaccag

SEQ ID NO: 38167 - DNA, 33 bp, Homo sapiens
ggtggaaggcagatagcagtggactaaagaggt

SEQ ID NO: 38168 - DNA, 33 bp, Homo sapiens
tacaggtacatataaaatgatttacaggtatct

SEQ ID NO: 38169 - DNA, 33 bp, Homo sapiens
gagcaggcttcctgtaggtcatcaaactcaaag

SEQ ID NO: 38170 - DNA, 33 bp, Homo sapiens
agcaatgctcctattcacacttttttaagttag

SEQ ID NO: 38171 - DNA, 33 bp, Homo sapiens
ctgtagatagtttgagaattatgaaatgtgact

SEQ ID NO: 38172 - DNA, 33 bp, Homo sapiens
gagataaaatacagaaaccttaacatgataaac

SEQ ID NO: 38173 - DNA, 33 bp, Homo sapiens
ttggctatattgtatacgactgagttccacatt

SEQ ID NO: 38174 - DNA, 33 bp, Homo sapiens
gacaagtttgtataaagcaatctgttctccttt

SEQ ID NO: 38175 - DNA, 33 bp, Homo sapiens
aagcttcctaataacaataggctaggattaacc

SEQ ID NO: 38176 - DNA, 33 bp, Homo sapiens
agtagaatggacaccacaaaatataaagagcca

SEQ ID NO: 38177 - DNA, 33 bp, Homo sapiens
ttgatactttttgtccaccttgtgctcattttc

SEQ ID NO: 38178 - DNA, 33 bp, Homo sapiens
gtccttttatcatttccctgaggctagctgaaa

SEQ ID NO: 38179 - DNA, 33 bp, Homo sapiens
aataaccgagagcaaagtgttcaatccagcccc

SEQ ID NO: 38180 - DNA, 33 bp, Homo sapiens
cattaagtggccaagacagaatgcaaacctttt

SEQ ID NO: 38181 - DNA, 51 bp, Homo sapiens
acaatttttcttaagagctaaatgaacctcgttaggtggattttcctctct

SEQ ID NO: 38182 - DNA, 33 bp, Homo sapiens
ttctccaacaaccaatcaacagatgtcttgaat

SEQ ID NO: 38183 - DNA, 33 bp, Homo sapiens
aagaactggtgtaatgaaactcaattctggtgc

SEQ ID NO: 38184 - DNA, 33 bp, Homo sapiens
ttctgattttataagaaactgtgttaataccta

SEQ ID NO: 38185 - DNA, 33 bp, Homo sapiens
agcccagatcctacacactcaggggccaaattt

SEQ ID NO: 38186 - DNA, 33 bp, Homo sapiens
tgtctattctctaaccagactgaggatatcaat

SEQ ID NO: 38187 - DNA, 33 bp, Homo sapiens
gaatagggctggcttacgaatccaggagttaat

SEQ ID NO: 38188 - DNA, 51 bp, Homo sapiens
tattcccacccagagcccagtgtaactgctttattgtatcaaattattgtc

SEQ ID NO: 38189 - DNA, 33 bp, Homo sapiens
gtcaaatgaaatcccaagccgtccaaatccgag

SEQ ID NO: 38190 - DNA, 33 bp, Homo sapiens
tttgtacttcctgttacgtcagtattgtgtgta

SEQ ID NO: 38191 - DNA, 33 bp, Homo sapiens
agtaaaagtttcaacaacatccgctagggcttg

SEQ ID NO: 38192 - DNA, 33 bp, Homo sapiens
tcccttccaacaacaacgtgaagcacagagctc

SEQ ID NO: 38193 - DNA, 33 bp, Homo sapiens
tgataaacctcacagtgaatgatccagctgccg

SEQ ID NO: 38194 - DNA, 33 bp, Homo sapiens
tatcaacgtgtgcatcaaggcaactcatttcct

SEQ ID NO: 38195 - DNA, 51 bp, Homo sapiens
atacctcgaatcttactacaacagtaaacttaacacaaaaaaggacatttt

SEQ ID NO: 38196 - DNA, 51 bp, Homo sapiens
ttcactgctctgtctccagcagttacggttcattcttaggttctgaaatca

SEQ ID NO: 38197 - DNA, 33 bp, Homo sapiens
gacctgcttgttggaacggtgcaaatggaaact

SEQ ID NO: 38198 - DNA, 33 bp, Homo sapiens
ttatatgaagattgagaaagtatagaggaaaaa

SEQ ID NO: 38199 - DNA, 33 bp, Homo sapiens
atccctgtagccttgcaattatgtggctgttat

SEQ ID NO: 38200 - DNA, 33 bp, Homo sapiens
caaactttccacacataacttaagagaagaaga

SEQ ID NO: 38201 - DNA, 33 bp, Homo sapiens
ttcatctctgcagagtcacaatggagttgctga

SEQ ID NO: 38202 - DNA, 33 bp, Homo sapiens
ttttatgagtcccagacgtttgctccaagtggt

SEQ ID NO: 38203 - DNA, 33 bp, Homo sapiens
ctttaggcttgctatacctttcactgaaaagca

SEQ ID NO: 38204 - DNA, 33 bp, Homo sapiens
cagtacatatagcttcacataaagatcagccat

SEQ ID NO: 38205 - DNA, 33 bp, Homo sapiens
actgaaactactcaaactgggaagtcgtgcagg

SEQ ID NO: 38206 - DNA, 33 bp, Homo sapiens
tcttttttggtgtttgcacagctaaggatgcag

SEQ ID NO: 38207 - DNA, 33 bp, Homo sapiens
tccttccctgctttaactgattgatctcatcat

SEQ ID NO: 38208 - DNA, 33 bp, Homo sapiens
tctttgggtatagtgtcaatagagttgatttgc

SEQ ID NO: 38209 - DNA, 33 bp, Homo sapiens
acatgcagcaaagatacccttctcaaaataaaa

SEQ ID NO: 38210 - DNA, 33 bp, Homo sapiens
gatggactcctaaaccaatctttatctaactgt

SEQ ID NO: 38211 - DNA, 33 bp, Homo sapiens
gagaaagctattgcaaaggatgatgttgaatac

SEQ ID NO: 38212 - DNA, 33 bp, Homo sapiens
atgcttgcagatgatcaatgtgcctgggatttg

SEQ ID NO: 38213 - DNA, 33 bp, Homo sapiens
gctcaactcctgaaatgatgaagggaaatcttt

SEQ ID NO: 38214 - DNA, 33 bp, Homo sapiens
cccaccatgcgtagaaagggatatgtttccaag

SEQ ID NO: 38215 - DNA, 33 bp, Homo sapiens
accatttcaaagcttaacttctttcaaatacca

SEQ ID NO: 38216 - DNA, 33 bp, Homo sapiens
ttctgatactaccttcacaatttattaaattct

SEQ ID NO: 38217 - DNA, 33 bp, Homo sapiens
tctcagcaaggatcacaatgacagcgtccactg

SEQ ID NO: 38218 - DNA, 33 bp, Homo sapiens
aatcttaaaaacagaaactaaacatcagtgtct

SEQ ID NO: 38219 - DNA, 33 bp, Homo sapiens
agatgacttgtctcaactgtgcaaaatggctgc

SEQ ID NO: 38220 - DNA, 33 bp, Homo sapiens
tccttctcctggtgcactgatccatcttaactc

SEQ ID NO: 38221 - DNA, 33 bp, Homo sapiens
acatatgagtagtttgcataacccataacaatt

SEQ ID NO: 38222 - DNA, 33 bp, Homo sapiens
cagtgaataggtctccaaaggacagagtctgca

SEQ ID NO: 38223 - DNA, 33 bp, Homo sapiens
acttgtgaaccctctgaacattcagtcgccaca

SEQ ID NO: 38224 - DNA, 33 bp, Homo sapiens
catgtattcaattgccacagggtcttttccaaa

SEQ ID NO: 38225 - DNA, 33 bp, Homo sapiens
caccccttaatttacacgatcttagtgcttttc

SEQ ID NO: 38226 - DNA, 51 bp, Homo sapiens
gacagagtgagactctgtctaaaaaataaataaatgagactttgtcagctc

SEQ ID NO: 38227 - DNA, 33 bp, Homo sapiens
tacagggtctgtgaccaaatacattgagaaact

SEQ ID NO: 38228 - DNA, 33 bp, Homo sapiens
tctctaaccagatcgacgctacagtttgtgaga

SEQ ID NO: 38229 - DNA, 33 bp, Homo sapiens
cctttcatcaagggccacagatcccagctacag

SEQ ID NO: 38230 - DNA, 33 bp, Homo sapiens
gttgagattaggaagaaaacttacaaaacagca

SEQ ID NO: 38231 - DNA, 33 bp, Homo sapiens
catttactgaaatctacgcccttttgtgtgatc

SEQ ID NO: 38232 - DNA, 33 bp, Homo sapiens
ccagggtagcagatacaacacccatgtgccaca

SEQ ID NO: 38233 - DNA, 51 bp, Homo sapiens
tgacaggtgtgaggtccaggtacacccggtcagattctctctcatttgggt

SEQ ID NO: 38234 - DNA, 33 bp, Homo sapiens
tttctttctcaaaaccacaatcactccgagcat

SEQ ID NO: 38235 - DNA, 33 bp, Homo sapiens
tctaactcaacactgccatgatgccctgagtaa

SEQ ID NO: 38236 - DNA, 51 bp, Homo sapiens
cctccagcagcctttcaacacatgcactgcacacatgcccccatgtgtctc

SEQ ID NO: 38237 - DNA, 51 bp, Homo sapiens
aagatgaggaaggtaaatgaaaatcccatgtttataaagatctaggatgcc

SEQ ID NO: 38238 - DNA, 33 bp, Homo sapiens
aaaaaatccaaccaaacaaagcagcagaacaaa

SEQ ID NO: 38239 - DNA, 33 bp, Homo sapiens
tatgagataaagacaaaagggaaatggtaggag

SEQ ID NO: 38240 - DNA, 33 bp, Homo sapiens
agatccttgctgtataagaacaggaatacagct

SEQ ID NO: 38241 - DNA, 33 bp, Homo sapiens
tccctaaaaaatttcgaaaatcatcctagtctt

SEQ ID NO: 38242 - DNA, 33 bp, Homo sapiens
tgtgatcatcaattaaatggctcttaattcctt

SEQ ID NO: 38243 - DNA, 33 bp, Homo sapiens
ggatgaatggaaaggaaatattcaaggggggag

SEQ ID NO: 38244 - DNA, 33 bp, Homo sapiens
gcccagtcctaaagaaaatgaaaacaacctctc

SEQ ID NO: 38245 - DNA, 33 bp, Homo sapiens
tatataacccttgcaccacacattttgaaaact

SEQ ID NO: 38246 - DNA, 33 bp, Homo sapiens
atatgaaattgtgtcactaatcagtctttattt

SEQ ID NO: 38247 - DNA, 33 bp, Homo sapiens
ctttcattaggctcaacctccaacgatgggtat

SEQ ID NO: 38248 - DNA, 51 bp, Homo sapiens
cactcacatgccacatccaattctacgcaagccagtgtgggttcctcaact

SEQ ID NO: 38249 - DNA, 33 bp, Homo sapiens
catgttttaagagaaccactctggcttgctaag

SEQ ID NO: 38250 - DNA, 33 bp, Homo sapiens
cagcccttcgttaataaccactctcttttcaga

SEQ ID NO: 38251 - DNA, 33 bp, Homo sapiens
ggacgtatgtgtacacaaaaacttgatcacaag

SEQ ID NO: 38252 - DNA, 33 bp, Homo sapiens
caatgggcattcatcaaactccaaaagcacggt

SEQ ID NO: 38253 - DNA, 51 bp, Homo sapiens
atactgtatgttttttgaataatgacaaaagcatgtaacataacacaaaca

SEQ ID NO: 38254 - DNA, 51 bp, Homo sapiens
aagatgaatgtgtataatggtcttaaagggatggagagtcaatatggggaa

SEQ ID NO: 38255 - DNA, 33 bp, Homo sapiens
acagcctactatttgaagaaagatcgtaaaaga

SEQ ID NO: 38256 - DNA, 33 bp, Homo sapiens
tcctgttaacagaagaagggagataaaacatca

SEQ ID NO: 38257 - DNA, 33 bp, Homo sapiens
ccactaaggagtttaccatatgccagagtaaat

SEQ ID NO: 38258 - DNA, 33 bp, Homo sapiens
attgcaaaggcagtaaatagcacaccaagaaat

SEQ ID NO: 38259 - DNA, 33 bp, Homo sapiens
tcagttgaaatgagtcaaatctgaaaacccttg

SEQ ID NO: 38260 - DNA, 33 bp, Homo sapiens
tcaactcttattttacagactagcacaacatgc

SEQ ID NO: 38261 - DNA, 33 bp, Homo sapiens
cagcactgctttactacatgacattaatgcatt

SEQ ID NO: 38262 - DNA, 33 bp, Homo sapiens
ttgcaattgacagatcactagataaaagagttt

SEQ ID NO: 38263 - DNA, 33 bp, Homo sapiens
ctttctgccagtgtaacatggacaaaattagta

SEQ ID NO: 38264 - DNA, 33 bp, Homo sapiens
acaatccaaattccaaacatctaagctgatttt

SEQ ID NO: 38265 - DNA, 33 bp, Homo sapiens
gctacatggtcattagaacatcccttcctctac

SEQ ID NO: 38266 - DNA, 33 bp, Homo sapiens
tgagtctcagatgagaactttgactttgagctt

SEQ ID NO: 38267 - DNA, 33 bp, Homo sapiens
agcagctactagagacacaacttcagttaaaaa

SEQ ID NO: 38268 - DNA, 51 bp, Homo sapiens
gaaatattttaaaggaggactccgaccaccgagctttggtgttgatactga

SEQ ID NO: 38269 - DNA, 51 bp, Homo sapiens
tcttgggtcagagccctcaccaggagcgtggcccatcactcagcccctgcc

SEQ ID NO: 38270 - DNA, 33 bp, Homo sapiens
gtctccatcagcaggaagaagcgtttgggggaa

SEQ ID NO: 38271 - DNA, 33 bp, Homo sapiens
cttctagaaaggactcactgtgcagctttgatg

SEQ ID NO: 38272 - DNA, 33 bp, Homo sapiens
gaattgatgcttgcccactccagaagatctagc

SEQ ID NO: 38273 - DNA, 33 bp, Homo sapiens
tgggagaagatgtaaaaaagtcagtatgtgaac

SEQ ID NO: 38274 - DNA, 33 bp, Homo sapiens
agtgatttttgcaagactcaagcaagatctagt

SEQ ID NO: 38275 - DNA, 33 bp, Homo sapiens
ctccgtggtagttagacgagcacagaggatggc

SEQ ID NO: 38276 - DNA, 33 bp, Homo sapiens
taataaatctctgaaaagataagtgagaaacca

SEQ ID NO: 38277 - DNA, 33 bp, Homo sapiens
tatttcttaccttttagcctcaaaacaaaggct

SEQ ID NO: 38278 - DNA, 33 bp, Homo sapiens
gctacagcaaccccaacccccacggtcacgtgc

SEQ ID NO: 38279 - DNA, 33 bp, Homo sapiens
cacttgccttgttcacacaatatgtcatgcata

SEQ ID NO: 38280 - DNA, 33 bp, Homo sapiens
aagtcagtggaaaacgaactcttcatcctatga

SEQ ID NO: 38281 - DNA, 33 bp, Homo sapiens
tattttctatgttccccaagcacccccttctgg

SEQ ID NO: 38282 - DNA, 33 bp, Homo sapiens
ttgcaaagcactaaataaatggagagatgcgcc

SEQ ID NO: 38283 - DNA, 33 bp, Homo sapiens
ctgcttttctaagagaacccaaatacagagtag

SEQ ID NO: 38284 - DNA, 33 bp, Homo sapiens
gacatggcggcttacacgttaataggtagattc

SEQ ID NO: 38285 - DNA, 33 bp, Homo sapiens
aggatgttaacagctactaatttaagtggtgac

SEQ ID NO: 38286 - DNA, 33 bp, Homo sapiens
tttagcctgttaatagaaagcgaacatctaccc

SEQ ID NO: 38287 - DNA, 33 bp, Homo sapiens
gagctggatgctgtcacatcatctttccggggt

SEQ ID NO: 38288 - DNA, 33 bp, Homo sapiens
gttccagctttctcaacggaaaatgaggctgtt

SEQ ID NO: 38289 - DNA, 33 bp, Homo sapiens
aaacaacagaaaccaacgccagttaactaaagt

SEQ ID NO: 38290 - DNA, 33 bp, Homo sapiens
attgatcattgttaaaccttgatgatggaaaca

SEQ ID NO: 38291 - DNA, 33 bp, Homo sapiens
accttctagcatctacacacctaaagcagggtt

SEQ ID NO: 38292 - DNA, 33 bp, Homo sapiens
gtgaggaagcaggtgacggcctgaccactgtac

SEQ ID NO: 38293 - DNA, 51 bp, Homo sapiens
tagcacttaccacgttgtaatgtaacttaactcttcacagggttcttgact

SEQ ID NO: 38294 - DNA, 33 bp, Homo sapiens
agggcacctgctggagaacatcgctggcagctg

SEQ ID NO: 38295 - DNA, 33 bp, Homo sapiens
atatcaaagagttaccaccattacagtatttac

SEQ ID NO: 38296 - DNA, 33 bp, Homo sapiens
tgttcatgcactcaacactatgtggtttcctgg

SEQ ID NO: 38297 - DNA, 33 bp, Homo sapiens
tagtcatcgcattggaactattcctctaccttc

SEQ ID NO: 38298 - DNA, 33 bp, Homo sapiens
tcctgttccttctggcacatgcattgctttgtg

SEQ ID NO: 38299 - DNA, 33 bp, Homo sapiens
attttttttcaccagacgttcactgacttcgtg

SEQ ID NO: 38300 - DNA, 33 bp, Homo sapiens
gcacttttaaaagacccattgaattgtttgtga

SEQ ID NO: 38301 - DNA, 33 bp, Homo sapiens
aagcaaagaaagtcacagaaagaaaccagagtg

SEQ ID NO: 38302 - DNA, 33 bp, Homo sapiens
ctgaaggagagcccaacaccaagttctaataat

SEQ ID NO: 38303 - DNA, 33 bp, Homo sapiens
tggtctgaggcagtttaaaaattgagagacagt

SEQ ID NO: 38304 - DNA, 33 bp, Homo sapiens
aaatgaaagttgatcaatacttggggaataaat

SEQ ID NO: 38305 - DNA, 33 bp, Homo sapiens
gaccagcttgcttaaccgatgttgggaagttgt

SEQ ID NO: 38306 - DNA, 33 bp, Homo sapiens
gttagaaaattgccaaaaaagtaataactgatt

SEQ ID NO: 38307 - DNA, 33 bp, Homo sapiens
cagaaactgaatgcaaatctgaaagctacactt

SEQ ID NO: 38308 - DNA, 51 bp, Homo sapiens
actaacacatgactactaaaatcagccttttttcatttctgctgtaactca

SEQ ID NO: 38309 - DNA, 51 bp, Homo sapiens
actcaaatattctataaatcctagaaataaaggaagcagtgtgtgtgtaat

SEQ ID NO: 38310 - DNA, 51 bp, Homo sapiens
gccccaggttggcctctctggtctacgacatgggaaagagatctctagagg

SEQ ID NO: 38311 - DNA, 33 bp, Homo sapiens
agttctcccaaagcacacatagtttttctcatt

SEQ ID NO: 38312 - DNA, 33 bp, Homo sapiens
agaggcgagcaatggacgaaaggagggaaaatc

SEQ ID NO: 38313 - DNA, 33 bp, Homo sapiens
ctctggtcatttgcagaatcaaatccaaactcc

SEQ ID NO: 38314 - DNA, 33 bp, Homo sapiens
cattatgttaactaccactgttttaaatcattt

SEQ ID NO: 38315 - DNA, 33 bp, Homo sapiens
caaaaagtataccaaaaagcaacaactaatacc

SEQ ID NO: 38316 - DNA, 33 bp, Homo sapiens
agttatccgaagcagaaagaatgggagggacac

SEQ ID NO: 38317 - DNA, 33 bp, Homo sapiens
ttgctagggaagtctacgccagaagaagagaag

SEQ ID NO: 38318 - DNA, 33 bp, Homo sapiens
attttattcagtacaacgtgaaacttcttgacc

SEQ ID NO: 38319 - DNA, 33 bp, Homo sapiens
ctcaatgccaatacacaagcaactttaagagac

SEQ ID NO: 38320 - DNA, 51 bp, Homo sapiens
attttaccaaactgtgtatagggacagcgagtgtgaccaatctgtctgcag

SEQ ID NO: 38321 - DNA, 33 bp, Homo sapiens
acaacctacagaatgacataaaagttttgcaat

SEQ ID NO: 38322 - DNA, 33 bp, Homo sapiens
ctccctggtttggaaacagccctgctcacagaa

SEQ ID NO: 38323 - DNA, 33 bp, Homo sapiens
tggaaggtctcaataacggtattcaaatgactg

SEQ ID NO: 38324 - DNA, 33 bp, Homo sapiens
caacaagcatggctgaataacttctggggctca

SEQ ID NO: 38325 - DNA, 33 bp, Homo sapiens
aggttgtgtatgctgcaaatggcggtgaagctt

SEQ ID NO: 38326 - DNA, 33 bp, Homo sapiens
tgtattaaattatgccacatagtctcgcatgtg

SEQ ID NO: 38327 - DNA, 51 bp, Homo sapiens
tagataccctagaaactagttctcccactggtgtaaaaaggatgctaagaa

SEQ ID NO: 38328 - DNA, 33 bp, Homo sapiens
gtaaatgggtatatgcactgcaaattatgattg

SEQ ID NO: 38329 - DNA, 33 bp, Homo sapiens
taactgttgaagagaaagggagtggcttcccca

SEQ ID NO: 38330 - DNA, 33 bp, Homo sapiens
ctcctgcaaagggtgacgtttgcatcagacacc

SEQ ID NO: 38331 - DNA, 33 bp, Homo sapiens
gaagaatactttgctacgtaggtgaatttaaaa

SEQ ID NO: 38332 - DNA, 33 bp, Homo sapiens
accacctgcaacatgccaagctactttggttgt

SEQ ID NO: 38333 - DNA, 33 bp, Homo sapiens
cccatacaggtcttgcacaattattagttgaaa

SEQ ID NO: 38334 - DNA, 33 bp, Homo sapiens
ctccatctccagagaaatgcagttcccccgtcc

SEQ ID NO: 38335 - DNA, 33 bp, Homo sapiens
atgaaatgagaaaaaacgctgggaagacgcacc

SEQ ID NO: 38336 - DNA, 33 bp, Homo sapiens
ttgtgtccaggcaaacgaaggcggttccaacac

SEQ ID NO: 38337 - DNA, 33 bp, Homo sapiens
ccccttagctttaaaacgtttgactgaaatcta

SEQ ID NO: 38338 - DNA, 33 bp, Homo sapiens
aggtctgatcggcccacgctttgatgaagagag

SEQ ID NO: 38339 - DNA, 33 bp, Homo sapiens
caaataatcatagcccacagtctacagccacaa

SEQ ID NO: 38340 - DNA, 51 bp, Homo sapiens
taagagaattaaggcagagaagagacgggagccacttagcagagggccatc

SEQ ID NO: 38341 - DNA, 51 bp, Homo sapiens
aatgaaaccaactaggtcaagcaatattatcctcttttatgtcactgaatt

SEQ ID NO: 38342 - DNA, 33 bp, Homo sapiens
cagaccctggtaacaccattagactttctattt

SEQ ID NO: 38343 - DNA, 33 bp, Homo sapiens
tgattccagttgtgatcagcatatttgcccatg

SEQ ID NO: 38344 - DNA, 33 bp, Homo sapiens
caagtggaaagagcaccgcagattgaggagtcc

SEQ ID NO: 38345 - DNA, 33 bp, Homo sapiens
aggctagcctaagatgacaaagttggatagaaa

SEQ ID NO: 38346 - DNA, 33 bp, Homo sapiens
ttcctttattgaaaacaccaggtggccgggatg

SEQ ID NO: 38347 - DNA, 33 bp, Homo sapiens
cagcgaacctctaccccagttatcaatactaga

SEQ ID NO: 38348 - DNA, 33 bp, Homo sapiens
agaagctaaccttgacagaaatagctccgtgtt

SEQ ID NO: 38349 - DNA, 33 bp, Homo sapiens
caatcattttctctaaccttcatagtagttgca

SEQ ID NO: 38350 - DNA, 33 bp, Homo sapiens
aacaactcatgttaaacagtacagtaggaccgc

SEQ ID NO: 38351 - DNA, 33 bp, Homo sapiens
ctaaggaactcggcaacggaaaagtgttggcca

SEQ ID NO: 38352 - DNA, 33 bp, Homo sapiens
acttccttgcgagtaccctaatctttttgtgcc

SEQ ID NO: 38353 - DNA, 33 bp, Homo sapiens
cagcatccccgcaccaagcattgcaatgggacc

SEQ ID NO: 38354 - DNA, 33 bp, Homo sapiens
ccatgaactcaactaccctcacaaacatcagtg

SEQ ID NO: 38355 - DNA, 33 bp, Homo sapiens
ctttggaaaatatggcacaaggtccatgaactc

SEQ ID NO: 38356 - DNA, 33 bp, Homo sapiens
caatgtcctcgttccacgaagcttttcctcatt

SEQ ID NO: 38357 - DNA, 33 bp, Homo sapiens
atctgttttgagaccacggtcactctagcagtc

SEQ ID NO: 38358 - DNA, 33 bp, Homo sapiens
cagaagtcagaagagaagcacttaaaacctgaa

SEQ ID NO: 38359 - DNA, 33 bp, Homo sapiens
atgaaggatctattcactgaacacataccgtgt

SEQ ID NO: 38360 - DNA, 33 bp, Homo sapiens
tcttgagatgtctgtacacttcagggtgtcaga

SEQ ID NO: 38361 - DNA, 33 bp, Homo sapiens
ataaataacgcaagtaaagaactccttgtagat

SEQ ID NO: 38362 - DNA, 51 bp, Homo sapiens
aaatgccatgatgtaaatttgtatgaaagttgtgtgaacattaaggaattt

SEQ ID NO: 38363 - DNA, 33 bp, Homo sapiens
cacacacacaactttgcatttggatttaaatgt

SEQ ID NO: 38364 - DNA, 33 bp, Homo sapiens
gtgctttactagtgccagcgcagtagtgcttag

SEQ ID NO: 38365 - DNA, 33 bp, Homo sapiens
gcttggactggaagataagccacttaggaaaat

SEQ ID NO: 38366 - DNA, 33 bp, Homo sapiens
gtgtgaaaggagaagcgaattctggcagatgaa

SEQ ID NO: 38367 - DNA, 33 bp, Homo sapiens
aagaataaattcagcaagagagtctgcggtgag

SEQ ID NO: 38368 - DNA, 33 bp, Homo sapiens
gctgcatgcctcgtccactggtttggagaacag

SEQ ID NO: 38369 - DNA, 33 bp, Homo sapiens
tctttgtctctccaataatcacaaagttaagct

SEQ ID NO: 38370 - DNA, 33 bp, Homo sapiens
agatgggtttggtgagaatgaaaacaacactta

SEQ ID NO: 38371 - DNA, 33 bp, Homo sapiens
tttactagctcaaaccgctgaagctcagaatga

SEQ ID NO: 38372 - DNA, 33 bp, Homo sapiens
aaatcagactaatacggcctgagaggaaattta

SEQ ID NO: 38373 - DNA, 33 bp, Homo sapiens
ttaatagtaaccaaaccctctgctctaacaacc

SEQ ID NO: 38374 - DNA, 33 bp, Homo sapiens
tctgtcttcactctgactcaatcaccaggggat

SEQ ID NO: 38375 - DNA, 33 bp, Homo sapiens
tctgtcaatgggctaaatggacctaacttacta

SEQ ID NO: 38376 - DNA, 33 bp, Homo sapiens
caccccagcagactagaaccaaactggaaccca

SEQ ID NO: 38377 - DNA, 33 bp, Homo sapiens
tccagcagcatatgccaacaaggactgcaaaca

SEQ ID NO: 38378 - DNA, 33 bp, Homo sapiens
atagttgaagaggcaaagaatcaaatattaata

SEQ ID NO: 38379 - DNA, 33 bp, Homo sapiens
tttttcataaacccacccattaacagccatgag

SEQ ID NO: 38380 - DNA, 33 bp, Homo sapiens
tttaggaatgttaaacactaattcttaattcaa

SEQ ID NO: 38381 - DNA, 33 bp, Homo sapiens
ctctagaaaattaccaagtaggaagtgttaata

SEQ ID NO: 38382 - DNA, 33 bp, Homo sapiens
gctgcacgtaggtccaatcttggatggtgcctt

SEQ ID NO: 38383 - DNA, 33 bp, Homo sapiens
aacatcctctacagggaaaagaagtatgctgat

SEQ ID NO: 38384 - DNA, 33 bp, Homo sapiens
gaattcagaagatcaaacaacgtctattttatc

SEQ ID NO: 38385 - DNA, 33 bp, Homo sapiens
ataatgtatagcaacactatgaatcccattttt

SEQ ID NO: 38386 - DNA, 33 bp, Homo sapiens
taaagccaggattctgcacagattgctgcccct

SEQ ID NO: 38387 - DNA, 33 bp, Homo sapiens
acagttgctaagctaacgagaaaacactaatca

SEQ ID NO: 38388 - DNA, 33 bp, Homo sapiens
gttaatcttggtgcaacctggacattttatatc

SEQ ID NO: 38389 - DNA, 33 bp, Homo sapiens
catacacaaatacaaacaggctatgctcccaga

SEQ ID NO: 38390 - DNA, 51 bp, Homo sapiens
attttaaagttcatgtaggtgttgacaatgatttccctttcaagccagaac

SEQ ID NO: 38391 - DNA, 51 bp, Homo sapiens
acatttttttaaataattgattggactcaagaagcaccacaaggccagaaa

SEQ ID NO: 38392 - DNA, 33 bp, Homo sapiens
ataattgaagctgggtaacagatacaagaggat

SEQ ID NO: 38393 - DNA, 33 bp, Homo sapiens
atgatgtgggaggacacgtgacaactggtgagt

SEQ ID NO: 38394 - DNA, 33 bp, Homo sapiens
gggtgacaggcatacacctactgcactaaagaa

SEQ ID NO: 38395 - DNA, 33 bp, Homo sapiens
aaacaacagtgaaaaacaagtcattctgcatct

SEQ ID NO: 38396 - DNA, 33 bp, Homo sapiens
tgtgagtttgcaagtccacgtggcacagagaca

SEQ ID NO: 38397 - DNA, 33 bp, Homo sapiens
aatattttgataagggaaaatccatgaatgaat

SEQ ID NO: 38398 - DNA, 51 bp, Homo sapiens
catggggtgttttataaacagtgaacatgcaacaacaaggaaaggctttcc

SEQ ID NO: 38399 - DNA, 33 bp, Homo sapiens
tcttgttattaggaaacgggcatgagtgtgtgc

SEQ ID NO: 38400 - DNA, 33 bp, Homo sapiens
gatggttttgggatgactcaaatgcattacact

SEQ ID NO: 38401 - DNA, 51 bp, Homo sapiens
ttaactagcttttcaacactttaaacatagaaatgattcaccgtgactttg

SEQ ID NO: 38402 - DNA, 33 bp, Homo sapiens
cttaatacgcaagtgcactgtaaccttttcaga

SEQ ID NO: 38403 - DNA, 33 bp, Homo sapiens
agactctgtgaattcaatatgttacatggcaaa

SEQ ID NO: 38404 - DNA, 33 bp, Homo sapiens
ccagcaactgtgcttccaaacataggatcttct

SEQ ID NO: 38405 - DNA, 33 bp, Homo sapiens
taaatccaagctttacagagattataaatttgt

SEQ ID NO: 38406 - DNA, 33 bp, Homo sapiens
gaggccatatgagaaccatcatgcaagagacca

SEQ ID NO: 38407 - DNA, 33 bp, Homo sapiens
cccagtggtctggggaacttctgtaaatcttac

SEQ ID NO: 38408 - DNA, 33 bp, Homo sapiens
aatcgacaccagaaacaactgaactgacgagag

SEQ ID NO: 38409 - DNA, 33 bp, Homo sapiens
caagcaaaattcaaacaaactttgaactcgttt

SEQ ID NO: 38410 - DNA, 33 bp, Homo sapiens
gagtttgtttcttatcacagttataacactcat

SEQ ID NO: 38411 - DNA, 33 bp, Homo sapiens
catcatgccagcatgaactgtgggcaaaacatg

SEQ ID NO: 38412 - DNA, 33 bp, Homo sapiens
acaaatacttctttccagctgactttgctcaga

SEQ ID NO: 38413 - DNA, 33 bp, Homo sapiens
acttccagccttgatgaaaatgttctgttacct

SEQ ID NO: 38414 - DNA, 33 bp, Homo sapiens
gtgttctctctctggacctttcatagtggtgtg

SEQ ID NO: 38415 - DNA, 33 bp, Homo sapiens
acttcgatgatgacgtgaagttgtctgcaaatc

SEQ ID NO: 38416 - DNA, 33 bp, Homo sapiens
acgtccctgttccttccgaaagactcaaaattg

SEQ ID NO: 38417 - DNA, 33 bp, Homo sapiens
aattagaacccccagacattgctggtaagaatt

SEQ ID NO: 38418 - DNA, 33 bp, Homo sapiens
actgttgaggggagtaaatatacaacctgcttt

SEQ ID NO: 38419 - DNA, 33 bp, Homo sapiens
tctgctctaagaaggcagagatcggagtttgtg

SEQ ID NO: 38420 - DNA, 33 bp, Homo sapiens
atttagttctcatctgcacctatccactccagt

SEQ ID NO: 38421 - DNA, 33 bp, Homo sapiens
cctgcagtctgcctctcactaaatgtctgggtt

SEQ ID NO: 38422 - DNA, 33 bp, Homo sapiens
catggaataaaccaaacgatggggacaaactag

SEQ ID NO: 38423 - DNA, 33 bp, Homo sapiens
gccccatgcactgtgacggaggttatttctctg

SEQ ID NO: 38424 - DNA, 33 bp, Homo sapiens
ggctgttggcaccatccaacaaaaggcaatgtg

SEQ ID NO: 38425 - DNA, 33 bp, Homo sapiens
taccagaaatagaaagcaacattgcagaatgat

SEQ ID NO: 38426 - DNA, 33 bp, Homo sapiens
gggacttttcaggtaccagcacttaaaggcaga

SEQ ID NO: 38427 - DNA, 33 bp, Homo sapiens
aggactacacctttcacgaatgttctgctaacc

SEQ ID NO: 38428 - DNA, 33 bp, Homo sapiens
tttcttactagattctaacagcttactggcatt

SEQ ID NO: 38429 - DNA, 33 bp, Homo sapiens
gaaaagagcccgtttcacaggtgcaggtgtttg

SEQ ID NO: 38430 - DNA, 33 bp, Homo sapiens
ctcatttcccttaggtcacaggatatcagcggg

SEQ ID NO: 38431 - DNA, 33 bp, Homo sapiens
tggacctatctattaagtctcccatactccact

SEQ ID NO: 38432 - DNA, 33 bp, Homo sapiens
gcctgctttcagtgaacgctcagctaccgggcc

SEQ ID NO: 38433 - DNA, 33 bp, Homo sapiens
tctttcttctgcccaccacagcaaattcaggtc

SEQ ID NO: 38434 - DNA, 33 bp, Homo sapiens
tgaatccagtgtggtaagaatcctctgaatccc

SEQ ID NO: 38435 - DNA, 33 bp, Homo sapiens
ttctggaaatcagtctaacatatcaagagacta

SEQ ID NO: 38436 - DNA, 33 bp, Homo sapiens
gttcttaccacgtaaaattaggcaaaaatgata

SEQ ID NO: 38437 - DNA, 33 bp, Homo sapiens
cacttgttcaacaccacgaagttacagaaggtg

SEQ ID NO: 38438 - DNA, 33 bp, Homo sapiens
ggaacgttctgcatcccgactttatcaacatgg

SEQ ID NO: 38439 - DNA, 33 bp, Homo sapiens
tccaaaaggcttttaaacaccacagtagtgctg

SEQ ID NO: 38440 - DNA, 33 bp, Homo sapiens
ccggcactgggccaagactcacaacagcctggg

SEQ ID NO: 38441 - DNA, 33 bp, Homo sapiens
ccggcaaggatggaggaagcactgtttgttgga

SEQ ID NO: 38442 - DNA, 33 bp, Homo sapiens
tggccagcatgtgaggccccgggctccgggttt

SEQ ID NO: 38443 - DNA, 33 bp, Homo sapiens
agggaggccaagcctacaacctgtgactagcag

SEQ ID NO: 38444 - DNA, 33 bp, Homo sapiens
gaaggctttggtccagaaagtcctgcttctctt

SEQ ID NO: 38445 - DNA, 51 bp, Homo sapiens
gcatggcagagggtacaggacctaaaatggtttttctgtgtccccacccaa

SEQ ID NO: 38446 - DNA, 33 bp, Homo sapiens
tttctattgtgaataaatgtgaaagtcagaacc

SEQ ID NO: 38447 - DNA, 33 bp, Homo sapiens
ccacgactctgggaccccaatacttagtgtgtc

SEQ ID NO: 38448 - DNA, 33 bp, Homo sapiens
tccaaacccattttcaaagatgcattgtccttg

SEQ ID NO: 38449 - DNA, 33 bp, Homo sapiens
gctgtgcacattcagcaagtgccttacgctttc

SEQ ID NO: 38450 - DNA, 33 bp, Homo sapiens
tgagaatcggacaccgcagtgcggcagcgctgt

SEQ ID NO: 38451 - DNA, 33 bp, Homo sapiens
gggttcaattttggtacgctgtattttcctgga

SEQ ID NO: 38452 - DNA, 33 bp, Homo sapiens
taactggttatagctgcagcacctctttctatt

SEQ ID NO: 38453 - DNA, 33 bp, Homo sapiens
gatatattttggtgaaacgaatatcaattttca

SEQ ID NO: 38454 - DNA, 33 bp, Homo sapiens
gaatctccatgaagaaacctttgcagtaacaac

SEQ ID NO: 38455 - DNA, 33 bp, Homo sapiens
tgaacagaagccatgcactattaaaacagtggc

SEQ ID NO: 38456 - DNA, 33 bp, Homo sapiens
caggtcaaaggtagataagagaggaatggttgc

SEQ ID NO: 38457 - DNA, 33 bp, Homo sapiens
ttactgtaaatggataagtaaatgactggtaaa

SEQ ID NO: 38458 - DNA, 33 bp, Homo sapiens
cagacaggtggagggagactggccagagctggc

SEQ ID NO: 38459 - DNA, 33 bp, Homo sapiens
tgttgtgtttctagaaatcgtcagctgggaggt

SEQ ID NO: 38460 - DNA, 33 bp, Homo sapiens
ttcccggtcacggcaccgccttttcactgatgc

SEQ ID NO: 38461 - DNA, 33 bp, Homo sapiens
taacatttatgaaaccagctaaaactcaaaacc

SEQ ID NO: 38462 - DNA, 33 bp, Homo sapiens
taatacaaaggcaagccagggtctgtctcggag

SEQ ID NO: 38463 - DNA, 33 bp, Homo sapiens
ggcctccttctaatgacaaaagggctgtttgct

SEQ ID NO: 38464 - DNA, 33 bp, Homo sapiens
gaagaatgtttgctaacagaggaattcctcatc

SEQ ID NO: 38465 - DNA, 33 bp, Homo sapiens
gcccgtagggagtatcacttgacggagagtgag

SEQ ID NO: 38466 - DNA, 33 bp, Homo sapiens
gccccctccgagagaccggaaatatgttggtac

SEQ ID NO: 38467 - DNA, 33 bp, Homo sapiens
aaattacctcaaaatgcaccataggtttaaatg

SEQ ID NO: 38468 - DNA, 51 bp, Homo sapiens
atgctgcaaaccagagagcaaggacaacatggaagatgcagaggaagggct

SEQ ID NO: 38469 - DNA, 33 bp, Homo sapiens
ttcagaaaaggaaacaccaaaggcgctggagct

SEQ ID NO: 38470 - DNA, 33 bp, Homo sapiens
gaaaacctgctataaaatggtaatgatgacaaa

SEQ ID NO: 38471 - DNA, 33 bp, Homo sapiens
gaatttgataaaagtcaacacttatgataaaaa

SEQ ID NO: 38472 - DNA, 33 bp, Homo sapiens
cagtcccttctggttgaaatatttgcatcatgt

SEQ ID NO: 38473 - DNA, 33 bp, Homo sapiens
ctttgtgtgctccagaaaaagggggcagcacca

SEQ ID NO: 38474 - DNA, 33 bp, Homo sapiens
ttattcttgtattcaccatctgctgtatcagct

SEQ ID NO: 38475 - DNA, 33 bp, Homo sapiens
tgagcacctcttagaacagcagccggagccagg

SEQ ID NO: 38476 - DNA, 33 bp, Homo sapiens
ggctggtcctgggaagcaggtagtcggagaagg

SEQ ID NO: 38477 - DNA, 33 bp, Homo sapiens
agagtttccaacagaccgagttggccgccacag

SEQ ID NO: 38478 - DNA, 33 bp, Homo sapiens
ggtttctacatgctaaagagcaacacggagcgg

SEQ ID NO: 38479 - DNA, 33 bp, Homo sapiens
acacagtggacacgctaaaggttggcaggctgc

SEQ ID NO: 38480 - DNA, 33 bp, Homo sapiens
gaagccaaagttcatgaatgacattttgttgtt

SEQ ID NO: 38481 - DNA, 33 bp, Homo sapiens
ttcacccaaattattccactcaccaaatcagcc

SEQ ID NO: 38482 - DNA, 33 bp, Homo sapiens
cccaggctgaccacccgcgagtgctgcccgcac

SEQ ID NO: 38483 - DNA, 33 bp, Homo sapiens
tcaacacaggaaagatgagagcacgtgggcaga

SEQ ID NO: 38484 - DNA, 33 bp, Homo sapiens
cactcttcctaatcaccgactcgaactgtaatg

SEQ ID NO: 38485 - DNA, 33 bp, Homo sapiens
gctccagcatacacggcaagagtcaccgagtgc

SEQ ID NO: 38486 - DNA, 33 bp, Homo sapiens
catgctagatagaccccctggagtcatttccac

SEQ ID NO: 38487 - DNA, 33 bp, Homo sapiens
tatcccaggatagaaacctgaacgcatccctga

SEQ ID NO: 38488 - DNA, 33 bp, Homo sapiens
ttccacccactggtcacgttgcagccgggtgag

SEQ ID NO: 38489 - DNA, 33 bp, Homo sapiens
agagtggaatatggacaatggtaggtgtatgaa

SEQ ID NO: 38490 - DNA, 33 bp, Homo sapiens
agtgcggaggggacagaatcatttaggagcaca

SEQ ID NO: 38491 - DNA, 33 bp, Homo sapiens
gataaggagattagtacgggtagaaggaggtca

SEQ ID NO: 38492 - DNA, 33 bp, Homo sapiens
gaggcataaatgtttacaatggttatctgtaac

SEQ ID NO: 38493 - DNA, 33 bp, Homo sapiens
agacccatctctagtaccagctacgtgggaggt

SEQ ID NO: 38494 - DNA, 33 bp, Homo sapiens
tcagggcatcttggaaaaactgaatttgctaac

SEQ ID NO: 38495 - DNA, 33 bp, Homo sapiens
cgacatccttggagaaaacaacaacaaaggctg

SEQ ID NO: 38496 - DNA, 33 bp, Homo sapiens
ttggcactgccttgcccaaaacctcctagagac

SEQ ID NO: 38497 - DNA, 33 bp, Homo sapiens
caggtaagccctgtgccgagccttcctgccctc

SEQ ID NO: 38498 - DNA, 51 bp, Homo sapiens
tagccacctttcacacaacttcctccggaaacacttgtgaattcctaagcc

SEQ ID NO: 38499 - DNA, 33 bp, Homo sapiens
caccacagtcagatacaatgctgacagggacgg

SEQ ID NO: 38500 - DNA, 33 bp, Homo sapiens
ccagagctcaaggactaaagtttccaaagagcc

SEQ ID NO: 38501 - DNA, 33 bp, Homo sapiens
gatgcaagctaccaccaggcggtcagctttgcc

SEQ ID NO: 38502 - DNA, 33 bp, Homo sapiens
ttccttccaaaactccccagctcttgggtaaca

SEQ ID NO: 38503 - DNA, 33 bp, Homo sapiens
gctcctcagagtataaagaaaagccagagcaga

SEQ ID NO: 38504 - DNA, 33 bp, Homo sapiens
cctaaatggtattaaacaactatgagcaacatg

SEQ ID NO: 38505 - DNA, 33 bp, Homo sapiens
taaaatgtgtctcttacgaacagcatataattg

SEQ ID NO: 38506 - DNA, 33 bp, Homo sapiens
ttaattatttttagtacagttgacaagcaaaaa

SEQ ID NO: 38507 - DNA, 33 bp, Homo sapiens
gccatgaacccttttacgcctatactctagtgt

SEQ ID NO: 38508 - DNA, 33 bp, Homo sapiens
aacccgatcacttttcccccaaacaattacatt

SEQ ID NO: 38509 - DNA, 33 bp, Homo sapiens
ggatgttgcattctgacatatgggtggcacaag

SEQ ID NO: 38510 - DNA, 51 bp, Homo sapiens
cattctggctgatgtagaaaaagctcaaggcaattatagttttacataact

SEQ ID NO: 38511 - DNA, 51 bp, Homo sapiens
ctacaatgtgagtcttggggtgaagccaaaagttgagttgtgtagcaagga

SEQ ID NO: 38512 - DNA, 33 bp, Homo sapiens
atgagtgatcatcttacaataaactttgtggcc

SEQ ID NO: 38513 - DNA, 33 bp, Homo sapiens
tgagagatcttgatggcagatgctgcttattgt

SEQ ID NO: 38514 - DNA, 33 bp, Homo sapiens
atatcgttgtagcgttcaaaatagttattccaa

SEQ ID NO: 38515 - DNA, 33 bp, Homo sapiens
ggcacactcttagttacagaaatgtgccatctt

SEQ ID NO: 38516 - DNA, 33 bp, Homo sapiens
ctatttaaagaacaaactttccacattgttgat

SEQ ID NO: 38517 - DNA, 33 bp, Homo sapiens
atatatcaaaagtaagccctcagatgtcatact

SEQ ID NO: 38518 - DNA, 33 bp, Homo sapiens
ggaattcaaagtattgcaacaggcttgaatctg

SEQ ID NO: 38519 - DNA, 51 bp, Homo sapiens
gttaatctaaatgaataaattaacactgataaacgtacctttctgctctga

SEQ ID NO: 38520 - DNA, 33 bp, Homo sapiens
tcccacattggcatcaccctggttttctacatc

SEQ ID NO: 38521 - DNA, 33 bp, Homo sapiens
atgacagacgtgatccacattgctgtctcctac

SEQ ID NO: 38522 - DNA, 33 bp, Homo sapiens
ccaaaacacatcctcaatattaaaatcaccaaa

SEQ ID NO: 38523 - DNA, 33 bp, Homo sapiens
agaaacaccagtggaacgaccatgtacaagctc

SEQ ID NO: 38524 - DNA, 33 bp, Homo sapiens
tttcattctctctcatgacttctcttgcagatc

SEQ ID NO: 38525 - DNA, 33 bp, Homo sapiens
taaatacgctcaaaaacacctcgacacagaaat

SEQ ID NO: 38526 - DNA, 33 bp, Homo sapiens
ctgagctaaggagttacatctagcatggtgttt

SEQ ID NO: 38527 - DNA, 33 bp, Homo sapiens
attacagaggtaagaacgcttgtgcaggagaag

SEQ ID NO: 38528 - DNA, 33 bp, Homo sapiens
cttggctataatgcagacccaaagaactgcttt

SEQ ID NO: 38529 - DNA, 33 bp, Homo sapiens
tccctttattccttaccgaagcaaatacatcag

SEQ ID NO: 38530 - DNA, 33 bp, Homo sapiens
caaggaagaagaagcaggatgacgaaccaggaa

SEQ ID NO: 38531 - DNA, 33 bp, Homo sapiens
ttcaaacattgaaaacggatttttctagagcac

SEQ ID NO: 38532 - DNA, 51 bp, Homo sapiens
acaatgtctctgagtttgctatttccacttcataatatttttaacaagata

SEQ ID NO: 38533 - DNA, 33 bp, Homo sapiens
agcataggagagctacagtaatactatttttaa

SEQ ID NO: 38534 - DNA, 33 bp, Homo sapiens
atccttgcattcctataataaactgtctgatca

SEQ ID NO: 38535 - DNA, 33 bp, Homo sapiens
ctggagttcccacagaaacaattctccatagta

SEQ ID NO: 38536 - DNA, 33 bp, Homo sapiens
tatcaatgtttcccaaagtaaggttcacttgcc

SEQ ID NO: 38537 - DNA, 33 bp, Homo sapiens
gtctccttctattccaagtttgctggagcttct

SEQ ID NO: 38538 - DNA, 33 bp, Homo sapiens
taaagggtaggtttccccagatccaatgggcca

SEQ ID NO: 38539 - DNA, 33 bp, Homo sapiens
atgcatagatatgccacaacagacattcgggct

SEQ ID NO: 38540 - DNA, 33 bp, Homo sapiens
gctttaaagagtcaaaatatcagagaacgttta

SEQ ID NO: 38541 - DNA, 33 bp, Homo sapiens
ccctcacatgcagaaaagcactcaagaatccag

SEQ ID NO: 38542 - DNA, 33 bp, Homo sapiens
gcactcagcctaaaaccgtatgttctctctaga

SEQ ID NO: 38543 - DNA, 33 bp, Homo sapiens
agggcctacactaccccacctcttctcacaagc

SEQ ID NO: 38544 - DNA, 33 bp, Homo sapiens
gggaacaggtttgagacgggtgcatcacggttt

SEQ ID NO: 38545 - DNA, 33 bp, Homo sapiens
ctttagcagtcactgaaagtccaccacaaggac

SEQ ID NO: 38546 - DNA, 33 bp, Homo sapiens
acaatactataacaacgaggttttcagtcaagg

SEQ ID NO: 38547 - DNA, 33 bp, Homo sapiens
aagcatatttgaagcagaaagacatggaaatat

SEQ ID NO: 38548 - DNA, 51 bp, Homo sapiens
ggatgcattgtttgccaggacagacagaacttcagtaagagttatctggca

SEQ ID NO: 38549 - DNA, 33 bp, Homo sapiens
gggagttatcagggtcaacatctttagttcata

SEQ ID NO: 38550 - DNA, 33 bp, Homo sapiens
gccaacttgcagccacacaaaagggcagcaccc

SEQ ID NO: 38551 - DNA, 33 bp, Homo sapiens
ggtcataaggagctaccgaactttttgatcaag

SEQ ID NO: 38552 - DNA, 33 bp, Homo sapiens
tgctctgctccctccccactcggacttgccagg

SEQ ID NO: 38553 - DNA, 33 bp, Homo sapiens
gtatttttaacctgcaaacaatgcttgggtata

SEQ ID NO: 38554 - DNA, 33 bp, Homo sapiens
tactgccagcaaaaaacgaaagcagaggctaaa

SEQ ID NO: 38555 - DNA, 33 bp, Homo sapiens
tcgggagcagaggtccagaagactggttccatc

SEQ ID NO: 38556 - DNA, 33 bp, Homo sapiens
ctcccgagccaatcctaaaaggtttctgacagc

SEQ ID NO: 38557 - DNA, 33 bp, Homo sapiens
ttgaatacgaggctgacaagaaccccaagagta

SEQ ID NO: 38558 - DNA, 33 bp, Homo sapiens
cctccctatgtaaaacagcaactcatctctact

SEQ ID NO: 38559 - DNA, 33 bp, Homo sapiens
aacagatacttcaccacagaggatacccaaaca

SEQ ID NO: 38560 - DNA, 33 bp, Homo sapiens
ggtattttcgtgcagaacttcacccagaaagcc

SEQ ID NO: 38561 - DNA, 33 bp, Homo sapiens
gcatctgtttaaagacaagcacatacctggaaa

SEQ ID NO: 38562 - DNA, 33 bp, Homo sapiens
agccaataaaataggcaagtttcctcccactcc

SEQ ID NO: 38563 - DNA, 33 bp, Homo sapiens
ctagggttcagtctccccttccagaaagtagaa

SEQ ID NO: 38564 - DNA, 33 bp, Homo sapiens
ttgtgatgacatatcacattgctgtttctttga

SEQ ID NO: 38565 - DNA, 33 bp, Homo sapiens
gtacaatggagaaggaagaaggattatcttgtt

SEQ ID NO: 38566 - DNA, 33 bp, Homo sapiens
gttattagggtggcaaaagcatagtgtgtttca

SEQ ID NO: 38567 - DNA, 33 bp, Homo sapiens
ggctccgaagaggacaacattgcaatggtgaca

SEQ ID NO: 38568 - DNA, 33 bp, Homo sapiens
agggcagcatcatcccaagagtgtaggagaggc

SEQ ID NO: 38569 - DNA, 33 bp, Homo sapiens
cgtggaccacggatgactatggaggggaagatc

SEQ ID NO: 38570 - DNA, 33 bp, Homo sapiens
cttgccagtgttcgtagaattgaaaatatttaa

SEQ ID NO: 38571 - DNA, 33 bp, Homo sapiens
atcttcaagagacccaagatccaggttgtctta

SEQ ID NO: 38572 - DNA, 33 bp, Homo sapiens
ctgattcgtataataaatcacagcaaaataacc

SEQ ID NO: 38573 - DNA, 33 bp, Homo sapiens
actcttacaagtcatacgcacacacaagacagc

SEQ ID NO: 38574 - DNA, 51 bp, Homo sapiens
actaaggaaagaagagacatactataaaactgtaattcagtagtactgtga

SEQ ID NO: 38575 - DNA, 33 bp, Homo sapiens
cacaatggctctcctacacaagaggttcatgag

SEQ ID NO: 38576 - DNA, 51 bp, Homo sapiens
ttgtcaacaatcatagacagtatacacggaaagaaaaagccagtaattttg

SEQ ID NO: 38577 - DNA, 33 bp, Homo sapiens
ataaacatataacatccagaaaaagaatgtgag

SEQ ID NO: 38578 - DNA, 33 bp, Homo sapiens
gaaaaaataccctgcaaactaattataagttta

SEQ ID NO: 38579 - DNA, 33 bp, Homo sapiens
ccaaaaggagcaattcacacttgaggaaatgag

SEQ ID NO: 38580 - DNA, 33 bp, Homo sapiens
ttctttaggaccttgaagtttagtactgtagtt

SEQ ID NO: 38581 - DNA, 51 bp, Homo sapiens
ggtatgcagggctagtattctcgaaaccaattttacatatgactagcagct

SEQ ID NO: 38582 - DNA, 51 bp, Homo sapiens
gaatctatcattgctaaatattcaaaaaggctataaattttaaagtaatat

SEQ ID NO: 38583 - DNA, 51 bp, Homo sapiens
actgtcacttttctctttggttttccaaatcttaactttatacaaattttc

SEQ ID NO: 38584 - DNA, 33 bp, Homo sapiens
ctacacaaccaagagaaactgaggtgtccagct

SEQ ID NO: 38585 - DNA, 33 bp, Homo sapiens
atgaatgttatgaccacgtttctaggtaacatc

SEQ ID NO: 38586 - DNA, 33 bp, Homo sapiens
tcttcatatttgacaaccagctggctactgaca

SEQ ID NO: 38587 - DNA, 33 bp, Homo sapiens
gttgaaattggcacataataacatttccagcag

SEQ ID NO: 38588 - DNA, 51 bp, Homo sapiens
tgcaaattcgtaacattctacctacaaacctctttctcagctctccctgcc

SEQ ID NO: 38589 - DNA, 33 bp, Homo sapiens
caagcaagaatccagacaccacagattaagaca

SEQ ID NO: 38590 - DNA, 33 bp, Homo sapiens
actattgttctttttcaaaatgttcttggctag

SEQ ID NO: 38591 - DNA, 33 bp, Homo sapiens
cctggaaggttcttcacacttgccttctaatgt

SEQ ID NO: 38592 - DNA, 33 bp, Homo sapiens
cctgcctcatctctgtaaagctggttacttcct

SEQ ID NO: 38593 - DNA, 33 bp, Homo sapiens
cgcgcttgaagagcaaaggattttgtcattgcg

SEQ ID NO: 38594 - DNA, 33 bp, Homo sapiens
ccccatctcctccaccgctacctctgagttcta

SEQ ID NO: 38595 - DNA, 33 bp, Homo sapiens
ctctttcagtgatgcaagctactcacccctaca

SEQ ID NO: 38596 - DNA, 33 bp, Homo sapiens
ttttataagaataccccacatattggattgggt

SEQ ID NO: 38597 - DNA, 33 bp, Homo sapiens
tcttcagaaagtccgcgcttaaatctgggggag

SEQ ID NO: 38598 - DNA, 33 bp, Homo sapiens
gaggagtaagctatgcacattcaagccaagagc

SEQ ID NO: 38599 - DNA, 33 bp, Homo sapiens
gtgtctggtagaggaaagttgcctttatgcacc

SEQ ID NO: 38600 - DNA, 33 bp, Homo sapiens
tagaatcattgctagtgaaagttgagagaagga

SEQ ID NO: 38601 - DNA, 33 bp, Homo sapiens
cagggcatagcacttaagagtaggtgacccctt

SEQ ID NO: 38602 - DNA, 33 bp, Homo sapiens
gctagaaattaacacccccagaaagcaactctc

SEQ ID NO: 38603 - DNA, 33 bp, Homo sapiens
atgagagaaatcctgagaatcatattgacacaa

SEQ ID NO: 38604 - DNA, 33 bp, Homo sapiens
aaatgagggctggaacacctgtctacttgcctg

SEQ ID NO: 38605 - DNA, 33 bp, Homo sapiens
ggacagccgccacatgaactaaaatggcaggtc

SEQ ID NO: 38606 - DNA, 33 bp, Homo sapiens
ctggaaatttggataccgaggctctgggaacgc

SEQ ID NO: 38607 - DNA, 33 bp, Homo sapiens
agaggaaatgatgtgcaaatgagaaaattttaa

SEQ ID NO: 38608 - DNA, 33 bp, Homo sapiens
cattgtcacccttacactgggaaaagagctgct

SEQ ID NO: 38609 - DNA, 33 bp, Homo sapiens
accaatgagtctgcaacaggtgtctcagcaggc

SEQ ID NO: 38610 - DNA, 51 bp, Homo sapiens
gtaaagggaagtatttgagtaaatacagcctgaacaccaatcagagatagg

SEQ ID NO: 38611 - DNA, 33 bp, Homo sapiens
tgttcgcagtcgcataatacaaccatgtttcac

SEQ ID NO: 38612 - DNA, 33 bp, Homo sapiens
cagtgacacctatgtgaagtgctaattggggaa

SEQ ID NO: 38613 - DNA, 33 bp, Homo sapiens
tgctgtattgcacaaaatcacccgggaaccttt

SEQ ID NO: 38614 - DNA, 33 bp, Homo sapiens
aactgggggcactttcaagccaaaactcccagc

SEQ ID NO: 38615 - DNA, 51 bp, Homo sapiens
ctccatttcccctccaattgccagacggttttaggcaacttacaagaaaaa

SEQ ID NO: 38616 - DNA, 33 bp, Homo sapiens
tataggtgctggggtcactttgttatacccggt

SEQ ID NO: 38617 - DNA, 33 bp, Homo sapiens
ttctgctgttaagtaaaaggcaccaactaaagc

SEQ ID NO: 38618 - DNA, 33 bp, Homo sapiens
ggtgcaaaaaggcctccaatcacaaaacacttc

SEQ ID NO: 38619 - DNA, 33 bp, Homo sapiens
ttgttcaggaacctgcaatgagtccccatcctt

SEQ ID NO: 38620 - DNA, 33 bp, Homo sapiens
acaattcccaggatagccattttgagggcaagg

SEQ ID NO: 38621 - DNA, 33 bp, Homo sapiens
atggaatctccaggatcaagctcaggatttctg

SEQ ID NO: 38622 - DNA, 33 bp, Homo sapiens
gagaagatggttggaaagatacaaggggtgact

SEQ ID NO: 38623 - DNA, 33 bp, Homo sapiens
ttagggctgatggagcagagaattaatcaggga

SEQ ID NO: 38624 - DNA, 33 bp, Homo sapiens
ctcaagagactcacttaaaagcttttctgggcc

SEQ ID NO: 38625 - DNA, 33 bp, Homo sapiens
agagctgcggataaaaaaagcaaaagctgagcc

SEQ ID NO: 38626 - DNA, 33 bp, Homo sapiens
cctcattgttaagcaactcatcactgtatatca

SEQ ID NO: 38627 - DNA, 33 bp, Homo sapiens
agcctggggacttccaatagccagtttgtgctg

SEQ ID NO: 38628 - DNA, 33 bp, Homo sapiens
aacacttgtgtgtctaaattttacagatgcttg

SEQ ID NO: 38629 - DNA, 33 bp, Homo sapiens
caatattttttttcaacctggagtagatacaga

SEQ ID NO: 38630 - DNA, 33 bp, Homo sapiens
tggaatttggaggaaacgtaaaatgtcagccag

SEQ ID NO: 38631 - DNA, 51 bp, Homo sapiens
acacagatatcagctattaactagccgatttgcaaaaacgtcagataaaac

SEQ ID NO: 38632 - DNA, 33 bp, Homo sapiens
ttatacagtagccaaactccacgtagcttttag

SEQ ID NO: 38633 - DNA, 33 bp, Homo sapiens
tgtcaacccttttcacaagctacatttcccttt

SEQ ID NO: 38634 - DNA, 33 bp, Homo sapiens
agctccaggatttcagcctacagaggaaaacag

SEQ ID NO: 38635 - DNA, 33 bp, Homo sapiens
agaacaggagtcagtaaactttttctataaagg

SEQ ID NO: 38636 - DNA, 33 bp, Homo sapiens
acttctccttcaaagaatacccctgtacaagtc

SEQ ID NO: 38637 - DNA, 33 bp, Homo sapiens
gcttgagtctgggtacaaaatggtgcaataagg

SEQ ID NO: 38638 - DNA, 33 bp, Homo sapiens
ttcatcaggacttataacatattggatctaagg

SEQ ID NO: 38639 - DNA, 33 bp, Homo sapiens
ttttaaaaatattcccaaagtcatgctgcttat

SEQ ID NO: 38640 - DNA, 33 bp, Homo sapiens
ttgcccagagtctccaaatagatacacacagga

SEQ ID NO: 38641 - DNA, 51 bp, Homo sapiens
gctaggaaggcaataaaggataagacgtgtttgagaaatagcaagaatttt

SEQ ID NO: 38642 - DNA, 33 bp, Homo sapiens
taggataattcacagacgtaatgtgcccattac

SEQ ID NO: 38643 - DNA, 33 bp, Homo sapiens
tcaaagatgaagggccgatgatctcaagttcat

SEQ ID NO: 38644 - DNA, 33 bp, Homo sapiens
ttatctgttgcaacaaatctaccactctgttat

SEQ ID NO: 38645 - DNA, 33 bp, Homo sapiens
tttttaggactatgtacattgggcacataagac

SEQ ID NO: 38646 - DNA, 33 bp, Homo sapiens
tgtgaatcaaaatggcacaatggctaaaatttc

SEQ ID NO: 38647 - DNA, 33 bp, Homo sapiens
aggcatagcaaaaagagcattgaacacaataaa

SEQ ID NO: 38648 - DNA, 51 bp, Homo sapiens
ttagtccataaagaaagatagagcaaaaaatacctacaagtaggcaagtaa

SEQ ID NO: 38649 - DNA, 33 bp, Homo sapiens
agtatgacattttagaagattccactaccttct

SEQ ID NO: 38650 - DNA, 33 bp, Homo sapiens
aatactttaaatgtcaactagtaattggatggg

SEQ ID NO: 38651 - DNA, 33 bp, Homo sapiens
aagcctgtataatgagcaaatttgatgtatgaa

SEQ ID NO: 38652 - DNA, 33 bp, Homo sapiens
agtgctaggtccttgacaaaatctccacaaatt

SEQ ID NO: 38653 - DNA, 33 bp, Homo sapiens
gatttccaacaacttcaacaatgtacccatttt

SEQ ID NO: 38654 - DNA, 33 bp, Homo sapiens
ttagtaataaatttcactaagtcagctaaacca

SEQ ID NO: 38655 - DNA, 33 bp, Homo sapiens
ccagtcagtaagggtcacccgaacttaggctct

SEQ ID NO: 38656 - DNA, 33 bp, Homo sapiens
ggagcacatggagaacaaccacattgtgtccca

SEQ ID NO: 38657 - DNA, 33 bp, Homo sapiens
tgttcaatgtcagacaacttgtaactgatagta

SEQ ID NO: 38658 - DNA, 33 bp, Homo sapiens
cagtctggaccaaaagaaatattgtaactgaca

SEQ ID NO: 38659 - DNA, 33 bp, Homo sapiens
tagataaaggcattaacctctgtcaggaaaaat

SEQ ID NO: 38660 - DNA, 33 bp, Homo sapiens
agtgcagccagcattacggattgtaagcaaacc

SEQ ID NO: 38661 - DNA, 33 bp, Homo sapiens
taaaattgagcagagcacagagagttcctatat

SEQ ID NO: 38662 - DNA, 33 bp, Homo sapiens
gagggcagttagatgacgacactcacactgtgg

SEQ ID NO: 38663 - DNA, 33 bp, Homo sapiens
gttactataaccagaaaattgagaaggaaagaa

SEQ ID NO: 38664 - DNA, 33 bp, Homo sapiens
agcattcagtgtatcaacaagcctcgtacaata

SEQ ID NO: 38665 - DNA, 33 bp, Homo sapiens
taaatacaatgctaaaaatgctgggcataaagt

SEQ ID NO: 38666 - DNA, 33 bp, Homo sapiens
cttaatttattcatctcacaaagaaaatggatc

SEQ ID NO: 38667 - DNA, 33 bp, Homo sapiens
gctaagatatggagtgaacctaaatatttatca

SEQ ID NO: 38668 - DNA, 33 bp, Homo sapiens
attcacagaacactatgaatacttacgtgtttc

SEQ ID NO: 38669 - DNA, 33 bp, Homo sapiens
gggacagtccagagtacagtttcgcaaaatgtg

SEQ ID NO: 38670 - DNA, 33 bp, Homo sapiens
cagttatgttttaacactggcattatgtgtgtc

SEQ ID NO: 38671 - DNA, 33 bp, Homo sapiens
catgcccagccaataactatattccttcgttta

SEQ ID NO: 38672 - DNA, 33 bp, Homo sapiens
ctctcttgttttccaactatttgttcacctgga

SEQ ID NO: 38673 - DNA, 33 bp, Homo sapiens
tcaggatcatgctttcacctggagcaacgtgaa

SEQ ID NO: 38674 - DNA, 33 bp, Homo sapiens
actagaagtccccatacatgccactggcagcca

SEQ ID NO: 38675 - DNA, 33 bp, Homo sapiens
acctacaatgagagaaaagtacatcaaaaggaa

SEQ ID NO: 38676 - DNA, 33 bp, Homo sapiens
gcttatcactagacacagaaaataaaaactatg

SEQ ID NO: 38677 - DNA, 33 bp, Homo sapiens
agtgtgaaccaccatacccggcaaaagatgcta

SEQ ID NO: 38678 - DNA, 33 bp, Homo sapiens
cctgccccaagctctacgcaaatgctgttcccc

SEQ ID NO: 38679 - DNA, 33 bp, Homo sapiens
gctcagatttcaggaagggggaacaggaagatg

SEQ ID NO: 38680 - DNA, 33 bp, Homo sapiens
tgacattggggaattaaagtgacaattcttaag

SEQ ID NO: 38681 - DNA, 33 bp, Homo sapiens
gagggcactgttccacaatgtgataggtatttc

SEQ ID NO: 38682 - DNA, 33 bp, Homo sapiens
ttgacctttttgcaggaacactccattcccatg

SEQ ID NO: 38683 - DNA, 33 bp, Homo sapiens
tggcaagggaatcataacaacagcacatggctc

SEQ ID NO: 38684 - DNA, 33 bp, Homo sapiens
tctctcaagtgggtcaaaaagataaggggcctc

SEQ ID NO: 38685 - DNA, 51 bp, Homo sapiens
gaaggatcctggtgaggtccaataacgcagccaagctgtgacacatctcta

SEQ ID NO: 38686 - DNA, 51 bp, Homo sapiens
catcaaaaccgagtgattgaaggagaatgagaacgagatggactttggtcc

SEQ ID NO: 38687 - DNA, 33 bp, Homo sapiens
taaaatttgatatgtcacatcactccattctct

SEQ ID NO: 38688 - DNA, 33 bp, Homo sapiens
gtcacagctcacataacactctcacaggtacct

SEQ ID NO: 38689 - DNA, 33 bp, Homo sapiens
ttttgaaatggaaatcaatacaaatgatatcac

SEQ ID NO: 38690 - DNA, 33 bp, Homo sapiens
ggaaccagctgttaaaatagaactccgcaaaac

SEQ ID NO: 38691 - DNA, 33 bp, Homo sapiens
aaaaccagcaagtgaaaaacgcatgcttggcag

SEQ ID NO: 38692 - DNA, 33 bp, Homo sapiens
ctgctactgagcttgacgtagtgtacacttgct

SEQ ID NO: 38693 - DNA, 33 bp, Homo sapiens
atctgctagcagtgaccgagtacgtagaaggaa

SEQ ID NO: 38694 - DNA, 33 bp, Homo sapiens
acatatgagtgaatgacgataataagtcacaaa

SEQ ID NO: 38695 - DNA, 33 bp, Homo sapiens
cacagacaccagaagaaaagaccacgtgaagac

SEQ ID NO: 38696 - DNA, 33 bp, Homo sapiens
gagccatcagaagtggaaagagggaagggagca

SEQ ID NO: 38697 - DNA, 33 bp, Homo sapiens
catactatacctatgcacagaatcatggatata

SEQ ID NO: 38698 - DNA, 33 bp, Homo sapiens
tgaacgagatatttaaacccttgtgagatgctt

SEQ ID NO: 38699 - DNA, 33 bp, Homo sapiens
ctatgtatcttttcgaagagtgtttgttcacgt

SEQ ID NO: 38700 - DNA, 33 bp, Homo sapiens
ttatcaggatggttgactacccactcaatttcc

SEQ ID NO: 38701 - DNA, 33 bp, Homo sapiens
ggccacttgcagataccaaaatctgaaaatctt

SEQ ID NO: 38702 - DNA, 33 bp, Homo sapiens
ttttgccagacaaatacggagaaaaaaggatgc

SEQ ID NO: 38703 - DNA, 33 bp, Homo sapiens
attctcaatcatatcaacattttacaggtccct

SEQ ID NO: 38704 - DNA, 33 bp, Homo sapiens
aatgattgccacaaaccgcctaacacaaagctt

SEQ ID NO: 38705 - DNA, 33 bp, Homo sapiens
caaaaagtcagagagtcacgtgaaaggtaactg

SEQ ID NO: 38706 - DNA, 33 bp, Homo sapiens
cactgaaaattgcttaaggtgctattaataact

SEQ ID NO: 38707 - DNA, 33 bp, Homo sapiens
ttagttgaagttcccaaatacatgatagcctgc

SEQ ID NO: 38708 - DNA, 33 bp, Homo sapiens
gtagcagttgaagaagaaccaacatatgaagtc

SEQ ID NO: 38709 - DNA, 33 bp, Homo sapiens
aataatggtcttcaagcatgattgatgttagta

SEQ ID NO: 38710 - DNA, 33 bp, Homo sapiens
tctattagatgttgcaaaatgttcttaacctct

SEQ ID NO: 38711 - DNA, 33 bp, Homo sapiens
ttatgccagactataaagcaatatttaggaatt

SEQ ID NO: 38712 - DNA, 33 bp, Homo sapiens
ctactgaagtctttgaataattacgtatcagga

SEQ ID NO: 38713 - DNA, 33 bp, Homo sapiens
cgcattaaagtacatcaccttaactcacttctg

SEQ ID NO: 38714 - DNA, 33 bp, Homo sapiens
gacttgatctaacataccatttatcacggtgaa

SEQ ID NO: 38715 - DNA, 33 bp, Homo sapiens
attcctattttacttcccttgcaaaaatataac

SEQ ID NO: 38716 - DNA, 33 bp, Homo sapiens
ttcccaagtgataagcaataatgacaaggttaa

SEQ ID NO: 38717 - DNA, 33 bp, Homo sapiens
ttatatacgacttttacattcttcacacttttc

SEQ ID NO: 38718 - DNA, 33 bp, Homo sapiens
attgagatgcattttgaaaacacagaaatccag

SEQ ID NO: 38719 - DNA, 33 bp, Homo sapiens
cagtctgtatcctctccgaagcaatgattttcc

SEQ ID NO: 38720 - DNA, 33 bp, Homo sapiens
ttttcctcacccccacaatgaatccagtagcaa

SEQ ID NO: 38721 - DNA, 33 bp, Homo sapiens
aatataggtggaatcccggaatataaagaaggc

SEQ ID NO: 38722 - DNA, 51 bp, Homo sapiens
caagaatacttaaagttccagagtacatatgcagttaacaatatagtctca

SEQ ID NO: 38723 - DNA, 33 bp, Homo sapiens
actttacagagctacaaaatactcacagagtga

SEQ ID NO: 38724 - DNA, 33 bp, Homo sapiens
taaatttttgtaaacacgcaaatgatctgaata

SEQ ID NO: 38725 - DNA, 33 bp, Homo sapiens
cctccaatatacacacaatttcatagtgccact

SEQ ID NO: 38726 - DNA, 33 bp, Homo sapiens
gtctttttagacataacgctattgtacacttaa

SEQ ID NO: 38727 - DNA, 51 bp, Homo sapiens
gggttgtttcttaaaaaaaattcacacaactgacaggaggaattgtcttta

SEQ ID NO: 38728 - DNA, 33 bp, Homo sapiens
actgtggcctgtgtacaatgtcaaaagagtagg

SEQ ID NO: 38729 - DNA, 33 bp, Homo sapiens
agaattttccactgaacagctgtgatatatgga

SEQ ID NO: 38730 - DNA, 33 bp, Homo sapiens
catgaatcatcctctactaccttttaacttttc

SEQ ID NO: 38731 - DNA, 33 bp, Homo sapiens
catcttccttcatgaccaacattttcatgtctg

SEQ ID NO: 38732 - DNA, 33 bp, Homo sapiens
gaggactggagggtgactattgtggttttcctg

SEQ ID NO: 38733 - DNA, 33 bp, Homo sapiens
cgaggaagtcattctgccaaccatcgtcttcat

SEQ ID NO: 38734 - DNA, 33 bp, Homo sapiens
gttctccatgcctgtgaagcaacctggaaggaa

SEQ ID NO: 38735 - DNA, 33 bp, Homo sapiens
gagaaggcagaaaagaagacgaagaaagaagca

SEQ ID NO: 38736 - DNA, 33 bp, Homo sapiens
atggaaaaattcctcaacatccaggtacagtcc

SEQ ID NO: 38737 - DNA, 33 bp, Homo sapiens
tgggtagctagtcagacacgaacagggcaggag

SEQ ID NO: 38738 - DNA, 33 bp, Homo sapiens
gacgttttgataagaacattagtatgaatagaa

SEQ ID NO: 38739 - DNA, 33 bp, Homo sapiens
ctactaaaattaaacactggggagactctccag

SEQ ID NO: 38740 - DNA, 33 bp, Homo sapiens
gtcaaactcaggaaatcagaggatagaatggta

SEQ ID NO: 38741 - DNA, 33 bp, Homo sapiens
tctccattccttactccataatcaaagcataca

SEQ ID NO: 38742 - DNA, 33 bp, Homo sapiens
aagaaagactatgcaaaaccactgtaatagaga

SEQ ID NO: 38743 - DNA, 33 bp, Homo sapiens
tggtaagagaaaatgaagaatgaaagagtagtc

SEQ ID NO: 38744 - DNA, 33 bp, Homo sapiens
caaggcaaactggatcacactgaagctcaagaa

SEQ ID NO: 38745 - DNA, 33 bp, Homo sapiens
aaactgaactcctttcactatggtggattttta

SEQ ID NO: 38746 - DNA, 33 bp, Homo sapiens
gctggcccaagtttacccaaacaccaggagaga

SEQ ID NO: 38747 - DNA, 51 bp, Homo sapiens
gaaatcacatataagcaatgtatgacacaaaattataaagcatcacacaaa

SEQ ID NO: 38748 - DNA, 33 bp, Homo sapiens
aggcataggaaagacaaatagcacgtattctta

SEQ ID NO: 38749 - DNA, 33 bp, Homo sapiens
tcatttagctgaaaaaccataatgatagcattg

SEQ ID NO: 38750 - DNA, 33 bp, Homo sapiens
ttctaaatgactacttaaaaaggcgagagtgat

SEQ ID NO: 38751 - DNA, 51 bp, Homo sapiens
tgaataaagcgctaaaatattatgaacaagtaaacacatttttaaggcctc

SEQ ID NO: 38752 - DNA, 51 bp, Homo sapiens
atttctagatagtagcaaggaatgaatacattaaaatttttaaatatgttg

SEQ ID NO: 38753 - DNA, 33 bp, Homo sapiens
taaagtactcacgatacgtaattctctcaaaag

SEQ ID NO: 38754 - DNA, 33 bp, Homo sapiens
taatggtcagagagaaatcaattttgtgtgttt

SEQ ID NO: 38755 - DNA, 33 bp, Homo sapiens
gtaattattgagttgaacatttaagcatatcag

SEQ ID NO: 38756 - DNA, 33 bp, Homo sapiens
aaggcagtacttattacagagaaagacagtttt

SEQ ID NO: 38757 - DNA, 33 bp, Homo sapiens
tgcctaaacttcttgcaaaggaaataagctgaa

SEQ ID NO: 38758 - DNA, 51 bp, Homo sapiens
aaatcagaacctgggtcatatcaagaactagcaataatgagcactgaaata

SEQ ID NO: 38759 - DNA, 33 bp, Homo sapiens
catacctcttttgcccacagactctgcttaaca

SEQ ID NO: 38760 - DNA, 33 bp, Homo sapiens
gctgaggtttcactgcaagtaaatatggccagg

SEQ ID NO: 38761 - DNA, 33 bp, Homo sapiens
atgtactgagtccaaagatattcattcaaataa

SEQ ID NO: 38762 - DNA, 33 bp, Homo sapiens
aatcacactgggtggcaatctactctggaactt

SEQ ID NO: 38763 - DNA, 33 bp, Homo sapiens
ttgaaaatctgggatacagaacatgcaggtttg

SEQ ID NO: 38764 - DNA, 33 bp, Homo sapiens
taaccattcaagcaaaagttagtagttaaaatt

SEQ ID NO: 38765 - DNA, 33 bp, Homo sapiens
aagacccttgtgggtccaggatcaaagggattt

SEQ ID NO: 38766 - DNA, 33 bp, Homo sapiens
gtgtctactttgacagacaggattaaaagtagg

SEQ ID NO: 38767 - DNA, 33 bp, Homo sapiens
acgaacttgctacaatgaaatggatgagttagg

SEQ ID NO: 38768 - DNA, 51 bp, Homo sapiens
tacataataatatatgggaaatataaatcagtgcaaacttattagtagata

SEQ ID NO: 38769 - DNA, 33 bp, Homo sapiens
attagtaaaatttgaaagaggcctgtagatgtg

SEQ ID NO: 38770 - DNA, 33 bp, Homo sapiens
cttgagtggatggttccaagagaggctttcctg

SEQ ID NO: 38771 - DNA, 33 bp, Homo sapiens
tcaccttcaaatggaacgccatcaagctaacag

SEQ ID NO: 38772 - DNA, 33 bp, Homo sapiens
tgtggggtgccatataggtagtattctggaggt

SEQ ID NO: 38773 - DNA, 33 bp, Homo sapiens
ggattaagagaaagccaccttttagatagctct

SEQ ID NO: 38774 - DNA, 33 bp, Homo sapiens
ttacttttacaactcaaagttctgtgtactatc

SEQ ID NO: 38775 - DNA, 51 bp, Homo sapiens
acacattttcctggcctatagttaccgggcacaataaaaggtgtgaaaaca

SEQ ID NO: 38776 - DNA, 33 bp, Homo sapiens
tattaacatggatgacggaacaaatcaatgaaa

SEQ ID NO: 38777 - DNA, 33 bp, Homo sapiens
atgaaatagtgttcagaagtagatacacatata

SEQ ID NO: 38778 - DNA, 33 bp, Homo sapiens
attatattcatggtcccagccaattccataaat

SEQ ID NO: 38779 - DNA, 33 bp, Homo sapiens
agagcaggaactatcacaaaatcttggcacaaa

SEQ ID NO: 38780 - DNA, 33 bp, Homo sapiens
gttcagggctatgctaaaaattagtaggccaaa

SEQ ID NO: 38781 - DNA, 33 bp, Homo sapiens
cctttgtgatatctgcacaatggtcttagtttt

SEQ ID NO: 38782 - DNA, 33 bp, Homo sapiens
tttctgctatcttcaacctgaatttaagaaaat

SEQ ID NO: 38783 - DNA, 51 bp, Homo sapiens
taaagtttcaatttagatcttgcctaaaaactttcaatagcaagaagacac

SEQ ID NO: 38784 - DNA, 33 bp, Homo sapiens
aaagcattccaaataaagaactctcccagtagt

SEQ ID NO: 38785 - DNA, 33 bp, Homo sapiens
aatttatatcaattacaatgttactggcaggtc

SEQ ID NO: 38786 - DNA, 33 bp, Homo sapiens
ttccttcttttttggccgaatattattcatata

SEQ ID NO: 38787 - DNA, 33 bp, Homo sapiens
acagaataatacagaaggttgggtgacaaattt

SEQ ID NO: 38788 - DNA, 33 bp, Homo sapiens
ttaaatgccaatgctcagaatatttaacctgca

SEQ ID NO: 38789 - DNA, 33 bp, Homo sapiens
taaaaagatgttatcaatgaagtaaactgttct

SEQ ID NO: 38790 - DNA, 33 bp, Homo sapiens
ttttcactcagcttaaatccttgaagtttcatc

SEQ ID NO: 38791 - DNA, 33 bp, Homo sapiens
tatttcaaagtaacacagtagctccatgtttag

SEQ ID NO: 38792 - DNA, 33 bp, Homo sapiens
acatccaaacactataagcctaggacatctaaa

SEQ ID NO: 38793 - DNA, 51 bp, Homo sapiens
tacatttagctgacagatgtttgcaataatcataattaatgttccaatcat

SEQ ID NO: 38794 - DNA, 51 bp, Homo sapiens
tgttgtcttgtcatcaatgacaacactcactcaatgggtccagagtcacta

SEQ ID NO: 38795 - DNA, 33 bp, Homo sapiens
gcctgctgaagaagccaaattgttttgccacag

SEQ ID NO: 38796 - DNA, 33 bp, Homo sapiens
agaggttaagttactgaaggcaagtgccatgga

SEQ ID NO: 38797 - DNA, 33 bp, Homo sapiens
aaagaaacagaaactcaagatactatagacaga

SEQ ID NO: 38798 - DNA, 33 bp, Homo sapiens
aggatttacaattacagacagtgctttattgag

SEQ ID NO: 38799 - DNA, 33 bp, Homo sapiens
ttagagcacaaaaagcaatgtgtaaaaatttgt

SEQ ID NO: 38800 - DNA, 33 bp, Homo sapiens
caatctacaggtttaacgtaattcccatcaaag

SEQ ID NO: 38801 - DNA, 33 bp, Homo sapiens
aagcagaaataagcataagagccaattaattgt

SEQ ID NO: 38802 - DNA, 33 bp, Homo sapiens
cgaacactatcaaaaaactccagcccagccatg

SEQ ID NO: 38803 - DNA, 33 bp, Homo sapiens
gccagagccagcaatcaatgtgaggaaggtgct

SEQ ID NO: 38804 - DNA, 33 bp, Homo sapiens
ccaatgaaatttataacgccttgtcaaattttt

SEQ ID NO: 38805 - DNA, 33 bp, Homo sapiens
gcctgtgctctatagacgaaataacaaagccta

SEQ ID NO: 38806 - DNA, 33 bp, Homo sapiens
gcactctggattcacaaaatttacattctatct

SEQ ID NO: 38807 - DNA, 51 bp, Homo sapiens
agattatagtcaaaagtggctttcagacctgattcagctataattttttaa

SEQ ID NO: 38808 - DNA, 33 bp, Homo sapiens
tttagaagtaacattgaaaacattaaacttctt

SEQ ID NO: 38809 - DNA, 33 bp, Homo sapiens
tattaagaaaatagccaaagtattgaaagtatc

SEQ ID NO: 38810 - DNA, 33 bp, Homo sapiens
tccctatgttgtgatacgacctgttaacttggc

SEQ ID NO: 38811 - DNA, 33 bp, Homo sapiens
ggctccctcatgctccacttctggttgggtttg

SEQ ID NO: 38812 - DNA, 33 bp, Homo sapiens
tgagaatgaaaactggcacagccattatggaca

SEQ ID NO: 38813 - DNA, 33 bp, Homo sapiens
tttactattctatgcaatcaaagtagaaaattt

SEQ ID NO: 38814 - DNA, 51 bp, Homo sapiens
catatactctaatagtaatttttgaaagaaagtgaaaacaagactaatttt

SEQ ID NO: 38815 - DNA, 33 bp, Homo sapiens
aactatgaagttcagtcaataataatgtatata

SEQ ID NO: 38816 - DNA, 33 bp, Homo sapiens
aagaactttgtcaattcaatcagatgaaatata

SEQ ID NO: 38817 - DNA, 51 bp, Homo sapiens
ggcagtgcaaccatttaggatttacagcctggaatatcacgttttagcaat

SEQ ID NO: 38818 - DNA, 33 bp, Homo sapiens
catgtacaggataaaacgcaatgaaagcccact

SEQ ID NO: 38819 - DNA, 33 bp, Homo sapiens
aaccagagcccttacactggtctacaagttcca

SEQ ID NO: 38820 - DNA, 33 bp, Homo sapiens
tcaaggaactggtatacgaaacagtgagagtgc

SEQ ID NO: 38821 - DNA, 33 bp, Homo sapiens
agaaaatactggaagacgatgtttgaggtaagc

SEQ ID NO: 38822 - DNA, 33 bp, Homo sapiens
cttttaaaaaatgacaagacacaaaatatgaca

SEQ ID NO: 38823 - DNA, 33 bp, Homo sapiens
ccttccacttaagccacattctaacttgacact

SEQ ID NO: 38824 - DNA, 33 bp, Homo sapiens
aaaatgggtgatatgacaaatgaaataggagtc

SEQ ID NO: 38825 - DNA, 33 bp, Homo sapiens
caaattttggagttaacggcctccacaattatg

SEQ ID NO: 38826 - DNA, 33 bp, Homo sapiens
ttgttagacgctaaccaggggaaagagtgcaga

SEQ ID NO: 38827 - DNA, 33 bp, Homo sapiens
attttcacattgtcgactcacttttttggtcac

SEQ ID NO: 38828 - DNA, 33 bp, Homo sapiens
tatggaacagtaaagaagttaatgtggttgggt

SEQ ID NO: 38829 - DNA, 33 bp, Homo sapiens
atgaagagaggaatggaaaaaagtgaatcggag

SEQ ID NO: 38830 - DNA, 33 bp, Homo sapiens
cagatgtgcaaatgaaaagagccaatcagacag

SEQ ID NO: 38831 - DNA, 33 bp, Homo sapiens
ttctcagagctcagtccacaacagcctgctgag

SEQ ID NO: 38832 - DNA, 33 bp, Homo sapiens
gcctttttgatttacacgtgtttatttatgagt

SEQ ID NO: 38833 - DNA, 33 bp, Homo sapiens
tgggttgcccacattcacctcaatatatctaac

SEQ ID NO: 38834 - DNA, 33 bp, Homo sapiens
tagattcatgctgatgacatatctcaagtgttg

SEQ ID NO: 38835 - DNA, 33 bp, Homo sapiens
acattaaagagcataacctccatgcagtccacc

SEQ ID NO: 38836 - DNA, 33 bp, Homo sapiens
ctgagatactcccatgcaggtggctttaattcc

SEQ ID NO: 38837 - DNA, 33 bp, Homo sapiens
gtataaagattaaggcaccagaggcaggtagga

SEQ ID NO: 38838 - DNA, 33 bp, Homo sapiens
accgaaataatatctgacaattacctggttttt

SEQ ID NO: 38839 - DNA, 33 bp, Homo sapiens
acaggacttgttttaaccaacatacaggcctgt

SEQ ID NO: 38840 - DNA, 33 bp, Homo sapiens
atcaacacattcattacggactgagagcacaca

SEQ ID NO: 38841 - DNA, 51 bp, Homo sapiens
attgcaaagctatgtacccgtgacaatgtaaatgaaaggtttgattgtgct

SEQ ID NO: 38842 - DNA, 33 bp, Homo sapiens
ctctgcattttgccaagagttggagaagttggg

SEQ ID NO: 38843 - DNA, 33 bp, Homo sapiens
ttgatttcttctcataagagtgggtgagattaa

SEQ ID NO: 38844 - DNA, 33 bp, Homo sapiens
ctggctaagtagccaacgtcttttgtggagagc

SEQ ID NO: 38845 - DNA, 33 bp, Homo sapiens
atgttatcaagctgcacgtgcgatcattcacac

SEQ ID NO: 38846 - DNA, 51 bp, Homo sapiens
ttagaagaccattttgcagagtgcagtacacagaatgttttcaggacaccc

SEQ ID NO: 38847 - DNA, 33 bp, Homo sapiens
ccctggatcttattgaagccttctgttttagct

SEQ ID NO: 38848 - DNA, 33 bp, Homo sapiens
ggaagagaaaacaccaatacacaccatatatca

SEQ ID NO: 38849 - DNA, 33 bp, Homo sapiens
catgtcagctgaaacccaatattagctatatct

SEQ ID NO: 38850 - DNA, 51 bp, Homo sapiens
caagatgctggtgacaccactgagacgtgagagagaagcacatggggcagg

SEQ ID NO: 38851 - DNA, 51 bp, Homo sapiens
taaaagtcttttaatcatccaatggaaatttaatggacaccttctgtatgc

SEQ ID NO: 38852 - DNA, 33 bp, Homo sapiens
ggactctggacaaccacgaggaaactttggaaa

SEQ ID NO: 38853 - DNA, 33 bp, Homo sapiens
aggagctgtgatctgacgaaggacattcagtga

SEQ ID NO: 38854 - DNA, 33 bp, Homo sapiens
ttgcttgcagctgttaactctaatccctataac

SEQ ID NO: 38855 - DNA, 33 bp, Homo sapiens
gttcaaatagactcaaaactgctgaacacaaat

SEQ ID NO: 38856 - DNA, 33 bp, Homo sapiens
ccatacctgtaagagaaaaacaacaggatattg

SEQ ID NO: 38857 - DNA, 51 bp, Homo sapiens
tcagatatggactccagtcatagtacaacgcttcagcctactgcaaatcca

SEQ ID NO: 38858 - DNA, 33 bp, Homo sapiens
gaaaataaaaagtaaagctctcactgaactcta

SEQ ID NO: 38859 - DNA, 51 bp, Homo sapiens
ctagtaagagtgtcaaaatgagtagaagaaaatggtttatgtcatacaggt

SEQ ID NO: 38860 - DNA, 33 bp, Homo sapiens
ttctcaaatctaaggacacttctggaattgctg

SEQ ID NO: 38861 - DNA, 33 bp, Homo sapiens
gatataggaaacatcaatcagggaatggagaaa

SEQ ID NO: 38862 - DNA, 33 bp, Homo sapiens
taggagcagattttacaacacggcttcaaactc

SEQ ID NO: 38863 - DNA, 51 bp, Homo sapiens
gaacctagaaaaaaggcctgaaatacaaacatacatttgggagttatcagg

SEQ ID NO: 38864 - DNA, 33 bp, Homo sapiens
cagaagtatgcttaacactcctatagtctgaag

SEQ ID NO: 38865 - DNA, 33 bp, Homo sapiens
gtgtggtcaagaattacatttgttacttggtct

SEQ ID NO: 38866 - DNA, 33 bp, Homo sapiens
ggcactggattcaaaacgggatggtgcttggga

SEQ ID NO: 38867 - DNA, 33 bp, Homo sapiens
aatctttcctcttgtcaacttggcaagcctggg

SEQ ID NO: 38868 - DNA, 33 bp, Homo sapiens
aacttcaatgaaaagacggactggtttataaaa

SEQ ID NO: 38869 - DNA, 51 bp, Homo sapiens
gcagtcattctgcaattacgttcacccttcttcaagctggctccaagtata

SEQ ID NO: 38870 - DNA, 33 bp, Homo sapiens
tgaaaaattctacagaagttccaagtgtggtgt

SEQ ID NO: 38871 - DNA, 33 bp, Homo sapiens
ctaaaaagcaacctcaagaattccaaaagctaa

SEQ ID NO: 38872 - DNA, 33 bp, Homo sapiens
gttcttcccccgtccacgacaaagattctctcc

SEQ ID NO: 38873 - DNA, 33 bp, Homo sapiens
atttcaggctagaatcaccaagatttgatgaca

SEQ ID NO: 38874 - DNA, 33 bp, Homo sapiens
attggaacctcagtcaataaaaaggcatctcct

SEQ ID NO: 38875 - DNA, 33 bp, Homo sapiens
atcactatctgtggagcagaaaatattctggtg

SEQ ID NO: 38876 - DNA, 51 bp, Homo sapiens
ttgttaaggggaaaaaattaacttacggtgtagtgattagagggaaacgtc

SEQ ID NO: 38877 - DNA, 33 bp, Homo sapiens
cggggtttttggtcaactaagttcaggaaacac

SEQ ID NO: 38878 - DNA, 33 bp, Homo sapiens
tttatagttaagtctcaaaatgaggtagtgtgt

SEQ ID NO: 38879 - DNA, 33 bp, Homo sapiens
ataaatccagaggtcccgatgagattgtgttga

SEQ ID NO: 38880 - DNA, 33 bp, Homo sapiens
tacacaatagaaaggacggacagttttcttgcc

SEQ ID NO: 38881 - DNA, 33 bp, Homo sapiens
gctgcaatttgctacaatggcccctctccaatg

SEQ ID NO: 38882 - DNA, 33 bp, Homo sapiens
aagtagaaaagtaaacgccaaggtaagattgtc

SEQ ID NO: 38883 - DNA, 33 bp, Homo sapiens
cagccctgtgaagggacgtatgccacactccaa

SEQ ID NO: 38884 - DNA, 33 bp, Homo sapiens
tagtttggtcaggtaccgggcaaagtaattttc

SEQ ID NO: 38885 - DNA, 33 bp, Homo sapiens
aacaggtggaaacaaacgtggattcctaagaca

SEQ ID NO: 38886 - DNA, 51 bp, Homo sapiens
tttcagccaagagaccaattaataacgcaagaaaaaaggtttattaaggac

SEQ ID NO: 38887 - DNA, 33 bp, Homo sapiens
tgtcacataagttatcactcaacattaagtagc

SEQ ID NO: 38888 - DNA, 33 bp, Homo sapiens
acaacaagtgccatgacgaggattctcatgaga

SEQ ID NO: 38889 - DNA, 33 bp, Homo sapiens
acttactgtatggaaaatgctgtggtcaaatta

SEQ ID NO: 38890 - DNA, 33 bp, Homo sapiens
tgtagcaactggaaaacgagacaaggaaacatg

SEQ ID NO: 38891 - DNA, 33 bp, Homo sapiens
agtgtgtgtattttccaacaattttccaaggta

SEQ ID NO: 38892 - DNA, 33 bp, Homo sapiens
aattagtttctctttacgtctgttgaaaccgcg

SEQ ID NO: 38893 - DNA, 33 bp, Homo sapiens
gtactatgagtttgcaaatgttaggaatacaac

SEQ ID NO: 38894 - DNA, 33 bp, Homo sapiens
aagactgcaaagcaaccagctaaaaacaccaag

SEQ ID NO: 38895 - DNA, 33 bp, Homo sapiens
ctcatttgaccctatcaccaaaggcagtcatat

SEQ ID NO: 38896 - DNA, 33 bp, Homo sapiens
agattccacctcaaaaaaccactttctttgctc

SEQ ID NO: 38897 - DNA, 33 bp, Homo sapiens
ttatttccttgtataacacacatgtttgatcca

SEQ ID NO: 38898 - DNA, 33 bp, Homo sapiens
gaaccaattggtgatacattgaaaaaacagttt

SEQ ID NO: 38899 - DNA, 33 bp, Homo sapiens
gaaagactagttagagacaatctaggagagaaa

SEQ ID NO: 38900 - DNA, 33 bp, Homo sapiens
gtgactatagctggtgcaatcattagcaaacag

SEQ ID NO: 38901 - DNA, 51 bp, Homo sapiens
tcctaatcacataatacatttttcacgctctagcgaagtaaatacaattag

SEQ ID NO: 38902 - DNA, 51 bp, Homo sapiens
attctcttcgagataggcacccttacaaaaagtgaagtcttccatgatgta

SEQ ID NO: 38903 - DNA, 33 bp, Homo sapiens
gcaacaactggtcatagctctcccttttctggg

SEQ ID NO: 38904 - DNA, 33 bp, Homo sapiens
atgttattttaaaacaactgtgccagttcttaa

SEQ ID NO: 38905 - DNA, 33 bp, Homo sapiens
aaatttcagatcttagcacagccaggaaacaat

SEQ ID NO: 38906 - DNA, 33 bp, Homo sapiens
tcctgtaagcctttcaaaatcttttcattctcc

SEQ ID NO: 38907 - DNA, 33 bp, Homo sapiens
gcccacatgtaacatggaattgcttccctgttt

SEQ ID NO: 38908 - DNA, 33 bp, Homo sapiens
tgcttataaatttgtaggaagtttctgccttgc

SEQ ID NO: 38909 - DNA, 33 bp, Homo sapiens
tgcaacggacgtgtcaaatagctctaccctggg

SEQ ID NO: 38910 - DNA, 33 bp, Homo sapiens
tcatataaataatgtaagtttcctctctgattg

SEQ ID NO: 38911 - DNA, 33 bp, Homo sapiens
aggctgctacaggtcaactgaatcaccaacccc

SEQ ID NO: 38912 - DNA, 33 bp, Homo sapiens
tcaccttccacacctcaaaagaaaagctgagtt

SEQ ID NO: 38913 - DNA, 33 bp, Homo sapiens
tgattaaataaatcaacgaattccagcatcaaa

SEQ ID NO: 38914 - DNA, 33 bp, Homo sapiens
catacattattaactcagacaagtcatttaaca

SEQ ID NO: 38915 - DNA, 33 bp, Homo sapiens
aatttcagttttccagcagctaggtatcccctg

SEQ ID NO: 38916 - DNA, 33 bp, Homo sapiens
acaaggcagctcatgggaaactaatcactcaga

SEQ ID NO: 38917 - DNA, 33 bp, Homo sapiens
cctctctaatctataaccttgtgtctctagaag

SEQ ID NO: 38918 - DNA, 33 bp, Homo sapiens
aacactgaaagttcacgaagtatcgggcattgc

SEQ ID NO: 38919 - DNA, 51 bp, Homo sapiens
ataatctgttcagtgaggagtataaacttgagtattacagtctggttcagg

SEQ ID NO: 38920 - DNA, 33 bp, Homo sapiens
attttgtcagccaataaaacaccacttgggtgt

SEQ ID NO: 38921 - DNA, 33 bp, Homo sapiens
ttcattttttctttcaagtctgtgtagtattcc

SEQ ID NO: 38922 - DNA, 51 bp, Homo sapiens
accccattcaaacatcacaataacacccccatttttccaacagggaaatta

SEQ ID NO: 38923 - DNA, 33 bp, Homo sapiens
gatgtatagcacttgaagtttcagaagaaggag

SEQ ID NO: 38924 - DNA, 33 bp, Homo sapiens
caaatgaggactccaactcctaagggatctcaa

SEQ ID NO: 38925 - DNA, 33 bp, Homo sapiens
gtgccatattgcttccgactatgtcatgtgagt

SEQ ID NO: 38926 - DNA, 33 bp, Homo sapiens
acttactcaggggcaaccttgggaaattccctc

SEQ ID NO: 38927 - DNA, 33 bp, Homo sapiens
ttagaaaagttgaataacctactagccatgtga

SEQ ID NO: 38928 - DNA, 33 bp, Homo sapiens
gtttgggtttgtagagacagcaatccttaaccc

SEQ ID NO: 38929 - DNA, 33 bp, Homo sapiens
aaatgatgattctcttcaaatcctacacaacca

SEQ ID NO: 38930 - DNA, 33 bp, Homo sapiens
tagggctcaacccagaagtctgacgcacatgaa

SEQ ID NO: 38931 - DNA, 33 bp, Homo sapiens
caggtacttgcagctacgaggacagctccagga

SEQ ID NO: 38932 - DNA, 33 bp, Homo sapiens
gaggggtcttggggacaccagttgcccttcttt

SEQ ID NO: 38933 - DNA, 33 bp, Homo sapiens
cagctcagtacaaaccaggctcagtacaaacag

SEQ ID NO: 38934 - DNA, 33 bp, Homo sapiens
tatataaacagtcatcgcttagaatccacggag

SEQ ID NO: 38935 - DNA, 33 bp, Homo sapiens
acgatctgacagttccactcccaattattttct

SEQ ID NO: 38936 - DNA, 33 bp, Homo sapiens
acccatgataaacaaacagcaaaattttaagta

SEQ ID NO: 38937 - DNA, 51 bp, Homo sapiens
gccagaaggtaaggaaggcacaaacaaacatccaattcacagtaataggag

SEQ ID NO: 38938 - DNA, 33 bp, Homo sapiens
cagtgcacagagttctgagaaagcattggggct

SEQ ID NO: 38939 - DNA, 33 bp, Homo sapiens
gggcgtgcctttcctccgaaataatattgttca

SEQ ID NO: 38940 - DNA, 33 bp, Homo sapiens
ctccattcccacaagacaatttatggcagttat

SEQ ID NO: 38941 - DNA, 33 bp, Homo sapiens
gtctctgccttttggacgggagataggccaccc

SEQ ID NO: 38942 - DNA, 33 bp, Homo sapiens
caacaggcaacttgaacggacaaggccctagaa

SEQ ID NO: 38943 - DNA, 33 bp, Homo sapiens
agatgttgcaatgtgaataagttttgctcaacg

SEQ ID NO: 38944 - DNA, 33 bp, Homo sapiens
gatgcaacaagagtaaagagcccagaatgatgc

SEQ ID NO: 38945 - DNA, 33 bp, Homo sapiens
actatcactctgctaaatgtggaatctcatcta

SEQ ID NO: 38946 - DNA, 33 bp, Homo sapiens
aagccagaggaatataaccaacatatctactca

SEQ ID NO: 38947 - DNA, 33 bp, Homo sapiens
gtgaacccccattcacaatcacctcaaagagaa

SEQ ID NO: 38948 - DNA, 33 bp, Homo sapiens
atctaaaactgcagaactatgattacctgcttt

SEQ ID NO: 38949 - DNA, 33 bp, Homo sapiens
cttttctggaccaagacgtgagtatttgaaacc

SEQ ID NO: 38950 - DNA, 33 bp, Homo sapiens
gaaaatgtgagagaaaggtgagaagagcatgag

SEQ ID NO: 38951 - DNA, 33 bp, Homo sapiens
caacttcctgacggtcccttttacatctttgtt

SEQ ID NO: 38952 - DNA, 33 bp, Homo sapiens
tggccatctgtaaccccctgctgtacatggtga

SEQ ID NO: 38953 - DNA, 33 bp, Homo sapiens
catccctggagactatgagcatcggttacagtg

SEQ ID NO: 38954 - DNA, 33 bp, Homo sapiens
tttttcattaaaatcaaaatgtgaagaacaata

SEQ ID NO: 38955 - DNA, 33 bp, Homo sapiens
tagcatcgactgtccaaagaaatcacttcttag

SEQ ID NO: 38956 - DNA, 33 bp, Homo sapiens
tttatcaatttctaccacataatgttgcttcag

SEQ ID NO: 38957 - DNA, 33 bp, Homo sapiens
tgtatgttacactgagaccctctagaagtgaaa

SEQ ID NO: 38958 - DNA, 33 bp, Homo sapiens
actgctgtgggtgaaacgtggcatgccctggaa

SEQ ID NO: 38959 - DNA, 33 bp, Homo sapiens
aggacatttttaccaacggtggtgcatcacaga

SEQ ID NO: 38960 - DNA, 33 bp, Homo sapiens
ccatgaaacattgtaaaaaattattggttgatc

SEQ ID NO: 38961 - DNA, 33 bp, Homo sapiens
gttccaccattaaaataactgtgtgatattggg

SEQ ID NO: 38962 - DNA, 33 bp, Homo sapiens
gagaccacagaagtaaatgattgctttgagttt

SEQ ID NO: 38963 - DNA, 33 bp, Homo sapiens
atgtgagccttcaaccaccttaaaaataactga

SEQ ID NO: 38964 - DNA, 33 bp, Homo sapiens
gcacctcacaaatcaacgaatagccgcaaaata

SEQ ID NO: 38965 - DNA, 33 bp, Homo sapiens
gccaaagcacaatttcaattcactgatctatgt

SEQ ID NO: 38966 - DNA, 33 bp, Homo sapiens
ctaagtattatgctaaacacttcctagtcactt

SEQ ID NO: 38967 - DNA, 33 bp, Homo sapiens
gttgtatgcatgctaacttaaggcattctccct

SEQ ID NO: 38968 - DNA, 33 bp, Homo sapiens
aaatctcagagttcgcaactaaaaaactcattc

SEQ ID NO: 38969 - DNA, 33 bp, Homo sapiens
caaattcaaaaggatacgcactggctttttctg

SEQ ID NO: 38970 - DNA, 33 bp, Homo sapiens
aaacaatatactaagaagtttgaatgtacctgg

SEQ ID NO: 38971 - DNA, 33 bp, Homo sapiens
gaatgtttgaatactcaaggaaattttagtaaa

SEQ ID NO: 38972 - DNA, 33 bp, Homo sapiens
gtatactatggaatcacactagatgaatgtatt

SEQ ID NO: 38973 - DNA, 33 bp, Homo sapiens
tttaagaatttggagagaatttgcatttgcttt

SEQ ID NO: 38974 - DNA, 33 bp, Homo sapiens
cgcaaaagaagatgtacgatcagccaaaaaaca

SEQ ID NO: 38975 - DNA, 33 bp, Homo sapiens
gggatatttaactccaagttctgtcctgggttt

SEQ ID NO: 38976 - DNA, 51 bp, Homo sapiens
cattcatttacagaaagaattactgaaactcaaacagctaaaataaattgt

SEQ ID NO: 38977 - DNA, 33 bp, Homo sapiens
ttttcttttcaagatcacattgaaaaccagctt

SEQ ID NO: 38978 - DNA, 33 bp, Homo sapiens
gggagaaagaggttacaggctccagacaagaaa

SEQ ID NO: 38979 - DNA, 33 bp, Homo sapiens
agatcctgtgttgcctattgatttcaagtctgg

SEQ ID NO: 38980 - DNA, 33 bp, Homo sapiens
ctattactatgaagtaagataatcaactatcct

SEQ ID NO: 38981 - DNA, 33 bp, Homo sapiens
catttatcatttatcaactatgaaccagtgcat

SEQ ID NO: 38982 - DNA, 33 bp, Homo sapiens
acttgatcaaattggcgaggtaattctcgtgcc

SEQ ID NO: 38983 - DNA, 33 bp, Homo sapiens
actccttgggaaaaacagcgaaggcaccactca

SEQ ID NO: 38984 - DNA, 51 bp, Homo sapiens
gctcagccacatgggcttccactcaacaaggctgacttggctacagtcact

SEQ ID NO: 38985 - DNA, 33 bp, Homo sapiens
ccctgctgcagtcttacgctccatgcagtccct

SEQ ID NO: 38986 - DNA, 33 bp, Homo sapiens
cgatacaacttcactcaagagctcgccgcttcc

SEQ ID NO: 38987 - DNA, 33 bp, Homo sapiens
attgatgacttcaggtcacacgatacaggaatg

SEQ ID NO: 38988 - DNA, 33 bp, Homo sapiens
tactttatatcttgacaaaatcgatcccacagg

SEQ ID NO: 38989 - DNA, 33 bp, Homo sapiens
tcacaagaatctgatccatactaagcagctgcc

SEQ ID NO: 38990 - DNA, 33 bp, Homo sapiens
ggggaaactaaggtacaaagagttaagagactt

SEQ ID NO: 38991 - DNA, 33 bp, Homo sapiens
ctccagctctgtaacacatggtggaacttcttt

SEQ ID NO: 38992 - DNA, 33 bp, Homo sapiens
tcagcatcatcctggactatgttcttccaagaa

SEQ ID NO: 38993 - DNA, 33 bp, Homo sapiens
agagaaactgaggcaccggaagacctgcttctc

SEQ ID NO: 38994 - DNA, 33 bp, Homo sapiens
ccaggagtgttgctcacgttactcccttaggcc

SEQ ID NO: 38995 - DNA, 33 bp, Homo sapiens
tggatgctctcaataaaaataacaaggcccagt

SEQ ID NO: 38996 - DNA, 33 bp, Homo sapiens
ctgtggttaccaagaaagtagccaatgtcaggg

SEQ ID NO: 38997 - DNA, 33 bp, Homo sapiens
ttttcacattgctaccaaatatatcctaaaatg

SEQ ID NO: 38998 - DNA, 33 bp, Homo sapiens
gttctagtcccagcaacgcctccaacagggtgt

SEQ ID NO: 38999 - DNA, 33 bp, Homo sapiens
aaagctttttgagtaccaatgtgaccctcaaag

SEQ ID NO: 39000 - DNA, 33 bp, Homo sapiens
aggtccctgagaacaacggaaataactcgtggc

SEQ ID NO: 39001 - DNA, 33 bp, Homo sapiens
ggtggaccataacagcaattgtatagaactctt

SEQ ID NO: 39002 - DNA, 33 bp, Homo sapiens
tccctgggacatcccacagtgaccgtgtccact

SEQ ID NO: 39003 - DNA, 33 bp, Homo sapiens
ctgtctttgtagaacacgcaggttagcccacca

SEQ ID NO: 39004 - DNA, 33 bp, Homo sapiens
tgtgggcaggaggtagaaagcacaagggataga

SEQ ID NO: 39005 - DNA, 33 bp, Homo sapiens
ctagagcttttcttgccgaggaaaagaatcatc

SEQ ID NO: 39006 - DNA, 33 bp, Homo sapiens
cagcttgtaactgccacgatgtcaaagccatgg

SEQ ID NO: 39007 - DNA, 33 bp, Homo sapiens
ggccagattctatactaaactctgaggctataa

SEQ ID NO: 39008 - DNA, 33 bp, Homo sapiens
ggaaagctctttctgacgagaggacgtttaggt

SEQ ID NO: 39009 - DNA, 33 bp, Homo sapiens
cagtgggagctataaacgtcagtgttgccttag

SEQ ID NO: 39010 - DNA, 51 bp, Homo sapiens
tcctaattactttccagtgtactaccaccaacaattcatcaacgagcattt

SEQ ID NO: 39011 - DNA, 33 bp, Homo sapiens
atattagaagtcggacactacatgaaagttaaa

SEQ ID NO: 39012 - DNA, 33 bp, Homo sapiens
tcagagaagtatgggaagatagttgaagggaga

SEQ ID NO: 39013 - DNA, 33 bp, Homo sapiens
ttgacataataagccactggaaaacggaaagat

SEQ ID NO: 39014 - DNA, 33 bp, Homo sapiens
ggaatgtcgttccttccccatctttgcagacgc

SEQ ID NO: 39015 - DNA, 33 bp, Homo sapiens
atcttcaattgactaccgcaaagaccctaaccc

SEQ ID NO: 39016 - DNA, 51 bp, Homo sapiens
gaggaatggcttattttctgatgaccacatgtgggactatttcaaccgcca

SEQ ID NO: 39017 - DNA, 33 bp, Homo sapiens
gacacagcaatgaaaacaactgcttctccactc

SEQ ID NO: 39018 - DNA, 33 bp, Homo sapiens
ggtcaagtgactccgaaatcaattttacttaga

SEQ ID NO: 39019 - DNA, 33 bp, Homo sapiens
ggtctctgttcttcaacacattagcgcaatgtg

SEQ ID NO: 39020 - DNA, 33 bp, Homo sapiens
cttaagaatgttcttaagaaagcagtaaaacgt

SEQ ID NO: 39021 - DNA, 33 bp, Homo sapiens
ggtttccagagggtgacgctcaacctttgccag

SEQ ID NO: 39022 - DNA, 33 bp, Homo sapiens
tgagatttgaacccagacggttggctccagtcg

SEQ ID NO: 39023 - DNA, 33 bp, Homo sapiens
agacatactgccaacacgcatggggatgctcga

SEQ ID NO: 39024 - DNA, 33 bp, Homo sapiens
tcccatctcagcctggaagtaatcccaaagtgc

SEQ ID NO: 39025 - DNA, 33 bp, Homo sapiens
aactagaagatctccaactagctattaaaaatt

SEQ ID NO: 39026 - DNA, 33 bp, Homo sapiens
gtgccaagtctataaacgtgtctggaattggtg

SEQ ID NO: 39027 - DNA, 33 bp, Homo sapiens
agcataaacgtgcaagaagagccaatacgtctt

SEQ ID NO: 39028 - DNA, 33 bp, Homo sapiens
tttcatgccaaaagcaagagaactgagtggtta

SEQ ID NO: 39029 - DNA, 33 bp, Homo sapiens
gtgtttaaagaggcaaaaatgaggagacattgc

SEQ ID NO: 39030 - DNA, 33 bp, Homo sapiens
gtacctaatttgcttcaagctttgtttttgggt

SEQ ID NO: 39031 - DNA, 33 bp, Homo sapiens
tgtctttctctcctaacgcgtgagtctgtactt

SEQ ID NO: 39032 - DNA, 33 bp, Homo sapiens
gaggttatggcatgcacaattagaacatccatg

SEQ ID NO: 39033 - DNA, 33 bp, Homo sapiens
ccctgcctgctggccacgtacctagacagccac

SEQ ID NO: 39034 - DNA, 33 bp, Homo sapiens
tggaaggaataaggagaagcactagatgagggc

SEQ ID NO: 39035 - DNA, 33 bp, Homo sapiens
ccaccatccagactataacacagaaccatccta

SEQ ID NO: 39036 - DNA, 33 bp, Homo sapiens
gctgcactctctcaggacccgtgtgattgagca

SEQ ID NO: 39037 - DNA, 33 bp, Homo sapiens
caatgggagtatgacacgattagagttttgaat

SEQ ID NO: 39038 - DNA, 51 bp, Homo sapiens
actgcgacccactcgtgcaccgtaccggagtttgtggatgactctagcaga

SEQ ID NO: 39039 - DNA, 33 bp, Homo sapiens
agtgatgggcaagtacaagttgtgaacagaacc

SEQ ID NO: 39040 - DNA, 33 bp, Homo sapiens
tgggtgggtagatgaacggatgatggatggata

SEQ ID NO: 39041 - DNA, 33 bp, Homo sapiens
aatggatggatggacaactggatagatgaatgg

SEQ ID NO: 39042 - DNA, 33 bp, Homo sapiens
cacctccaacagtgggaacgacatttcgatatg

SEQ ID NO: 39043 - DNA, 33 bp, Homo sapiens
tctgagaacataacagcattctaatgtgttggc

SEQ ID NO: 39044 - DNA, 33 bp, Homo sapiens
tttgactttctggatacgctgaacttatgcgca

SEQ ID NO: 39045 - DNA, 33 bp, Homo sapiens
agggccacggagggtacgagtagtcagttgagg

SEQ ID NO: 39046 - DNA, 33 bp, Homo sapiens
agcccatgtcaaatttaaaaaaatcatcgccaa

SEQ ID NO: 39047 - DNA, 33 bp, Homo sapiens
agaagacctgagtgaacgtttggagatggcgag

SEQ ID NO: 39048 - DNA, 33 bp, Homo sapiens
gactgctcttgctataactttttcctggatgtt

SEQ ID NO: 39049 - DNA, 33 bp, Homo sapiens
tcctagtctcctctaaaccagtgtcttcctcat

SEQ ID NO: 39050 - DNA, 33 bp, Homo sapiens
cctgattccgtttataagaaatgctcagaatag

SEQ ID NO: 39051 - DNA, 33 bp, Homo sapiens
tgcatacacgcttctggactgtaccattgtata

SEQ ID NO: 39052 - DNA, 33 bp, Homo sapiens
tttcgtggctggaaccaacaccaaccctagcac

SEQ ID NO: 39053 - DNA, 33 bp, Homo sapiens
cgcagaccccggggacaatcaagatgccagctc

SEQ ID NO: 39054 - DNA, 33 bp, Homo sapiens
ttgcccaagaggaagacgacaggaaaggtgggg

SEQ ID NO: 39055 - DNA, 33 bp, Homo sapiens
ctataaatgattgttacgaaaagttcaagtaat

SEQ ID NO: 39056 - DNA, 33 bp, Homo sapiens
tagttttcagttttgaagcaactggtttctatt

SEQ ID NO: 39057 - DNA, 33 bp, Homo sapiens
aaccttaattggccagcagaggtttgcatgaag

SEQ ID NO: 39058 - DNA, 33 bp, Homo sapiens
tatatgcattaaaaataaaatcccttcgctgct

SEQ ID NO: 39059 - DNA, 33 bp, Homo sapiens
tgcccggagaatgggaacagcactgtcagcaga

SEQ ID NO: 39060 - DNA, 33 bp, Homo sapiens
gaacccgcaagccagaacgtattcccatgacct

SEQ ID NO: 39061 - DNA, 33 bp, Homo sapiens
gaatggctaagaagaaataaatcaaagtttagc

SEQ ID NO: 39062 - DNA, 33 bp, Homo sapiens
ggtcctggggctctaaaggtagtaggggctcta

SEQ ID NO: 39063 - DNA, 33 bp, Homo sapiens
ggccatcatttcctgaaggatgtaaactctctt

SEQ ID NO: 39064 - DNA, 33 bp, Homo sapiens
gttcttgcctcttgaagctggaggcatttggct

SEQ ID NO: 39065 - DNA, 33 bp, Homo sapiens
cacgaatcctaccatacattgttgagccatgtt

SEQ ID NO: 39066 - DNA, 33 bp, Homo sapiens
caaagcaattgtaaaacgtgggggaggaaatta

SEQ ID NO: 39067 - DNA, 33 bp, Homo sapiens
tgcaagcttgaagtggaccaactctttttagga

SEQ ID NO: 39068 - DNA, 33 bp, Homo sapiens
gctccccagaaaacccagagttcttcaaatccc

SEQ ID NO: 39069 - DNA, 33 bp, Homo sapiens
tgggcggatcctgaagacactaactgtggccat

SEQ ID NO: 39070 - DNA, 33 bp, Homo sapiens
gcgcagggagatgcaacgaggaagcgcttcctt

SEQ ID NO: 39071 - DNA, 33 bp, Homo sapiens
gtaaaattgtgaaatacatgtaagtgtttatgt

SEQ ID NO: 39072 - DNA, 33 bp, Homo sapiens
ttattattagggaaaagttggaaacagtgtgag

SEQ ID NO: 39073 - DNA, 33 bp, Homo sapiens
taggagctggaaatcacagaatctctcaccctt

SEQ ID NO: 39074 - DNA, 33 bp, Homo sapiens
agcctggcattggctacacccacttctggttag

SEQ ID NO: 39075 - DNA, 33 bp, Homo sapiens
gggagggccttggataacagagagagggatttg

SEQ ID NO: 39076 - DNA, 33 bp, Homo sapiens
agttattcactgtttagctgaaattcacatttg

SEQ ID NO: 39077 - DNA, 33 bp, Homo sapiens
ttcttgcattgctgtaaagaactacctgagact

SEQ ID NO: 39078 - DNA, 33 bp, Homo sapiens
tccccagccagggtaacagcttgatcagatgtg

SEQ ID NO: 39079 - DNA, 33 bp, Homo sapiens
acatcatgctggttcactatattgatgtcattt

SEQ ID NO: 39080 - DNA, 33 bp, Homo sapiens
cacaactaccttcccactggcctctggactcca

SEQ ID NO: 39081 - DNA, 33 bp, Homo sapiens
gaaacatgggcatacaactttattccttcctgc

SEQ ID NO: 39082 - DNA, 33 bp, Homo sapiens
aaaaacctttgaattacgtagatttatgccgct

SEQ ID NO: 39083 - DNA, 33 bp, Homo sapiens
ctaagccaattaatgcagaatggaaagtcaaac

SEQ ID NO: 39084 - DNA, 33 bp, Homo sapiens
ccaaatgaaataaagaaataaagcgacacatta

SEQ ID NO: 39085 - DNA, 33 bp, Homo sapiens
tcatttatttaagagccctttccgattgcctcc

SEQ ID NO: 39086 - DNA, 33 bp, Homo sapiens
agaactctgaagatgacgagctagctaaagaat

SEQ ID NO: 39087 - DNA, 33 bp, Homo sapiens
ccaggccctgggcagaataattgacttggggac

SEQ ID NO: 39088 - DNA, 33 bp, Homo sapiens
tctagatgttctgacccaaagatgtagtctaca

SEQ ID NO: 39089 - DNA, 33 bp, Homo sapiens
ttatagctgatgaaacaaacttgaaaaaattaa

SEQ ID NO: 39090 - DNA, 33 bp, Homo sapiens
tagattctagtcaccacgctaatgtctcacaca

SEQ ID NO: 39091 - DNA, 33 bp, Homo sapiens
caaaggtgtgatccatcaataaaagcatcatta

SEQ ID NO: 39092 - DNA, 33 bp, Homo sapiens
agggcttcagtgtctccaagtgtaatgcaaaga

SEQ ID NO: 39093 - DNA, 33 bp, Homo sapiens
agcggacacccagtaaagtatgcaattttgctt

SEQ ID NO: 39094 - DNA, 33 bp, Homo sapiens
aagacttgggaaacttgaacaagtctgcagtgg

SEQ ID NO: 39095 - DNA, 33 bp, Homo sapiens
ctgtttgaaggccaggaagaatggtatttggag

SEQ ID NO: 39096 - DNA, 33 bp, Homo sapiens
actactgccaaaagtacgatttcttgtgaattt

SEQ ID NO: 39097 - DNA, 33 bp, Homo sapiens
acaggtgttgaactaacgtgtaacgatttgata

SEQ ID NO: 39098 - DNA, 51 bp, Homo sapiens
ttcttgtttccaatattatgggacacgaaatctttgagattctagaaagtt

SEQ ID NO: 39099 - DNA, 33 bp, Homo sapiens
aaataaatgaggaagaaaagttagaataagacc

SEQ ID NO: 39100 - DNA, 33 bp, Homo sapiens
acattctcttagacagacacccacctgattatg

SEQ ID NO: 39101 - DNA, 33 bp, Homo sapiens
actttcctaagcaaacacaaactgagcgagttt

SEQ ID NO: 39102 - DNA, 33 bp, Homo sapiens
cacatttcaaaataaactgtgccttcgcagtag

SEQ ID NO: 39103 - DNA, 33 bp, Homo sapiens
aaagtggggaatcagcaacttaggttaaataat

SEQ ID NO: 39104 - DNA, 33 bp, Homo sapiens
ctcttgagtcaaccctcagagacaaactctcag

SEQ ID NO: 39105 - DNA, 51 bp, Homo sapiens
gaagttttcaacacatggtcaaataataagaaaacaatcagattgtttagg

SEQ ID NO: 39106 - DNA, 51 bp, Homo sapiens
ttagtagtgattctaatttgttccacagataaaactaggggaatttcaaga

SEQ ID NO: 39107 - DNA, 33 bp, Homo sapiens
gagaccccaagaggaaagaattgagctatactt

SEQ ID NO: 39108 - DNA, 33 bp, Homo sapiens
ctgatagtggcctctacgataaatttaaaacca

SEQ ID NO: 39109 - DNA, 33 bp, Homo sapiens
agaggacattttgccacgatgtaagttgtttaa

SEQ ID NO: 39110 - DNA, 51 bp, Homo sapiens
gtctaggcttccaggcctgtgatgagaagggctgccatgaagatctctgac

SEQ ID NO: 39111 - DNA, 33 bp, Homo sapiens
agacaagccttagaagaagctgtacagaaccat

SEQ ID NO: 39112 - DNA, 33 bp, Homo sapiens
attctgcataaactaaaaagctgtggatatttt

SEQ ID NO: 39113 - DNA, 33 bp, Homo sapiens
tgaaaaagtatgagataagtctggttcatttta

SEQ ID NO: 39114 - DNA, 33 bp, Homo sapiens
aggaggaaatagctcacgccaaatcattgggat

SEQ ID NO: 39115 - DNA, 51 bp, Homo sapiens
ccacattggctctatgttcagagagcgtctaccctcaagttttcaagattg

SEQ ID NO: 39116 - DNA, 33 bp, Homo sapiens
cactttactgaacaataaagaaggtgagagaga

SEQ ID NO: 39117 - DNA, 33 bp, Homo sapiens
agaggtaggggcacaacggtgaaaaataaatat

SEQ ID NO: 39118 - DNA, 33 bp, Homo sapiens
cactcttcctcctgaagtcttatggccttttcc

SEQ ID NO: 39119 - DNA, 33 bp, Homo sapiens
ttgcactagcttcctcaacattacttagagaag

SEQ ID NO: 39120 - DNA, 33 bp, Homo sapiens
gtaaataggagttagacgcagaatggaacacat

SEQ ID NO: 39121 - DNA, 33 bp, Homo sapiens
tacacttttttttccacgctaatcgagaaaagc

SEQ ID NO: 39122 - DNA, 33 bp, Homo sapiens
agcataggattataaaatgtgggttagccatca

SEQ ID NO: 39123 - DNA, 33 bp, Homo sapiens
caagcacaaaagaataccagcccttgaatgaga

SEQ ID NO: 39124 - DNA, 33 bp, Homo sapiens
agtccaatagtaacaacgtgatttacagtaggt

SEQ ID NO: 39125 - DNA, 33 bp, Homo sapiens
acatcttgagagcaaactaaatcacatttggac

SEQ ID NO: 39126 - DNA, 33 bp, Homo sapiens
gcaggtggactatttccacatttgctctttata

SEQ ID NO: 39127 - DNA, 33 bp, Homo sapiens
tgacctttgtctgaaacgctggacaaaatttca

SEQ ID NO: 39128 - DNA, 33 bp, Homo sapiens
cccatctggcattccacaggagaaggtctactg

SEQ ID NO: 39129 - DNA, 33 bp, Homo sapiens
gtacttacgggaatataaagctaatgagatgtg

SEQ ID NO: 39130 - DNA, 33 bp, Homo sapiens
tgtgattgtccctttaaacagcttatcagtgac

SEQ ID NO: 39131 - DNA, 33 bp, Homo sapiens
gttattctagactcaacgaacctctagacattt

SEQ ID NO: 39132 - DNA, 33 bp, Homo sapiens
gatatttactcaagcacgtcaagaggtaagagg

SEQ ID NO: 39133 - DNA, 33 bp, Homo sapiens
actaaagaaatcctcaatgaagctgctttgaca

SEQ ID NO: 39134 - DNA, 33 bp, Homo sapiens
aattttgcatatttgacgtatgttgctgtatac

SEQ ID NO: 39135 - DNA, 33 bp, Homo sapiens
actttcaccagaattacattttcaagggattaa

SEQ ID NO: 39136 - DNA, 51 bp, Homo sapiens
gaaaaaataaatacatcttcctaacaatcttaactgatgcctcacaactct

SEQ ID NO: 39137 - DNA, 33 bp, Homo sapiens
aaacacccttaccctacggcttctgaccttagg

SEQ ID NO: 39138 - DNA, 33 bp, Homo sapiens
aaagaatggactatcaatacaatcaacaaatta

SEQ ID NO: 39139 - DNA, 33 bp, Homo sapiens
ggctacttcagagcaaccagaagtcttaatgtt

SEQ ID NO: 39140 - DNA, 33 bp, Homo sapiens
gcatgctattatgctaccaaaagcttaaaatat

SEQ ID NO: 39141 - DNA, 33 bp, Homo sapiens
aaggtacatttttgtaacttcgccactcatacc

SEQ ID NO: 39142 - DNA, 51 bp, Homo sapiens
gttagatgctttctgtaatggaaaactgattggctttaaaaataagaaaaa

SEQ ID NO: 39143 - DNA, 33 bp, Homo sapiens
acatggcatcactcttaaaatttgagacaggtt

SEQ ID NO: 39144 - DNA, 33 bp, Homo sapiens
ttacccattagggaaactgcattctaaccaagc

SEQ ID NO: 39145 - DNA, 33 bp, Homo sapiens
aggggcttatagagatcaggtaattcatggagc

SEQ ID NO: 39146 - DNA, 33 bp, Homo sapiens
gaaatttgcagggtaaaatactagatatgagag

SEQ ID NO: 39147 - DNA, 33 bp, Homo sapiens
agtgaaggtaagacccagctaataacaaaactt

SEQ ID NO: 39148 - DNA, 33 bp, Homo sapiens
tgtcttattatgcagacagagttccctagataa

SEQ ID NO: 39149 - DNA, 33 bp, Homo sapiens
agttttcctttgtaaccggtgccaaagataggt

SEQ ID NO: 39150 - DNA, 33 bp, Homo sapiens
acttattgtagaaaacggggggcaagacaagta

SEQ ID NO: 39151 - DNA, 33 bp, Homo sapiens
atatggaagaaaccagaaatagtgaaatttggg

SEQ ID NO: 39152 - DNA, 33 bp, Homo sapiens
gttttgttgattgtcacggataaaggtacaact

SEQ ID NO: 39153 - DNA, 33 bp, Homo sapiens
taagttgcttactttacgccaaaaattagctag

SEQ ID NO: 39154 - DNA, 51 bp, Homo sapiens
ttgctgttagatttacaaataagtacgttgttattactgacatgcaaaatc

SEQ ID NO: 39155 - DNA, 33 bp, Homo sapiens
taaggcctatttctcagaagtcacattttgttg

SEQ ID NO: 39156 - DNA, 33 bp, Homo sapiens
taagcaactggattcaacgtaccactaatggcc

SEQ ID NO: 39157 - DNA, 33 bp, Homo sapiens
tttcctgtgacaatgaatattacagtacaaaaa

SEQ ID NO: 39158 - DNA, 33 bp, Homo sapiens
tgtgttatagtgggaaaaagactggattcagag

SEQ ID NO: 39159 - DNA, 33 bp, Homo sapiens
cttccctttatctctaacttatcactaatctat

SEQ ID NO: 39160 - DNA, 33 bp, Homo sapiens
ttctgaaacaggtatacgttactttcacacagg

SEQ ID NO: 39161 - DNA, 33 bp, Homo sapiens
ttgtggatttgtaagtcaaacaaaggctcattt

SEQ ID NO: 39162 - DNA, 33 bp, Homo sapiens
tctctatcctcatacacctcataaccatacacc

SEQ ID NO: 39163 - DNA, 33 bp, Homo sapiens
gacaatacgcaaactaagcacccataagatatt

SEQ ID NO: 39164 - DNA, 33 bp, Homo sapiens
caaaagaattaacacaatgtcaggacaaactgt

SEQ ID NO: 39165 - DNA, 33 bp, Homo sapiens
gattatagagttcacaaggtatttcaaagccat

SEQ ID NO: 39166 - DNA, 33 bp, Homo sapiens
ctgcactggctactaacgtgcaccataaattcc

SEQ ID NO: 39167 - DNA, 51 bp, Homo sapiens
ctatcaaataaatgtgagccagaagatttttaatgggagaaattaacttta

SEQ ID NO: 39168 - DNA, 51 bp, Homo sapiens
aatggtatttgtgtagctaaacatagatctaaacatagaacagatacagta

SEQ ID NO: 39169 - DNA, 33 bp, Homo sapiens
gttatactgtggaatgcatcttgaagatcacct

SEQ ID NO: 39170 - DNA, 33 bp, Homo sapiens
tgcaggttttgattccacagatctgggtgggac

SEQ ID NO: 39171 - DNA, 33 bp, Homo sapiens
aaggaagtacctcctacgatatgcaagacaaaa

SEQ ID NO: 39172 - DNA, 33 bp, Homo sapiens
acaagtattaactgtgcattgctttgagcttag

SEQ ID NO: 39173 - DNA, 51 bp, Homo sapiens
aagtaacaaatgattatagcaattacagtgggtgagtgcaatgagagggga

SEQ ID NO: 39174 - DNA, 51 bp, Homo sapiens
aggtatcttactagataagcgcacaaaagagttctttactagacatgatga

SEQ ID NO: 39175 - DNA, 33 bp, Homo sapiens
ctgctcttcgtactgaccctgcttttctgcagg

SEQ ID NO: 39176 - DNA, 33 bp, Homo sapiens
tggggtacacaaaaaagtaaatctgaaacagac

SEQ ID NO: 39177 - DNA, 33 bp, Homo sapiens
tacagtcacattggggaagattaagacatgaga

SEQ ID NO: 39178 - DNA, 51 bp, Homo sapiens
aagctcagttgccctgatagtagcacgtttctgtttctgatgtaccttttt

SEQ ID NO: 39179 - DNA, 33 bp, Homo sapiens
tctgcaaccagaacctaaggtgacttatagttg

SEQ ID NO: 39180 - DNA, 33 bp, Homo sapiens
agatatttctcaaccactgctaccagaactaca

SEQ ID NO: 39181 - DNA, 33 bp, Homo sapiens
agggatgctgagtctaagcaaggcagataaagc

SEQ ID NO: 39182 - DNA, 33 bp, Homo sapiens
ttcctggtatataacaaattctcaattaataca

SEQ ID NO: 39183 - DNA, 33 bp, Homo sapiens
atttgcttattctaccaatttctcagttctaac

SEQ ID NO: 39184 - DNA, 33 bp, Homo sapiens
ttgggagggcatgtaaacttcaaaacccttcca

SEQ ID NO: 39185 - DNA, 33 bp, Homo sapiens
gtgttccctcctatacacaagcacagaaaatgc

SEQ ID NO: 39186 - DNA, 33 bp, Homo sapiens
taaaatagtcactacgccaatgtaccatatttg

SEQ ID NO: 39187 - DNA, 33 bp, Homo sapiens
ctaatggtgttttgaacaagcatttagaaaatt

SEQ ID NO: 39188 - DNA, 33 bp, Homo sapiens
ccaaactcctctgctaccttgttatctacttag

SEQ ID NO: 39189 - DNA, 33 bp, Homo sapiens
tctttctcttacatcacactttccttatacatg

SEQ ID NO: 39190 - DNA, 33 bp, Homo sapiens
atggcgaaaaaccatacataaaccagtgcattc

SEQ ID NO: 39191 - DNA, 33 bp, Homo sapiens
acatgtgttggggtcacagaaccatcagtagac

SEQ ID NO: 39192 - DNA, 33 bp, Homo sapiens
gtagatctaagagtgcaacctcagaaatcccac

SEQ ID NO: 39193 - DNA, 33 bp, Homo sapiens
atgctgggatatgcaccgagatttgtctaacta

SEQ ID NO: 39194 - DNA, 33 bp, Homo sapiens
gaagttgacaaaacctcaaggctagtgtgatgt

SEQ ID NO: 39195 - DNA, 33 bp, Homo sapiens
ctgattaccagttgaacgggtgtgaaagtgctc

SEQ ID NO: 39196 - DNA, 51 bp, Homo sapiens
gagacttgatgcagtttaacacaaccatggaataaatggaaggagtagaga

SEQ ID NO: 39197 - DNA, 51 bp, Homo sapiens
aaagttaatataatggctgcgggaactatttagataatctcacagcagaag

SEQ ID NO: 39198 - DNA, 51 bp, Homo sapiens
ctactaaaactatttcaaaaaatcaagaagcgtctcctccctaactcattc

SEQ ID NO: 39199 - DNA, 33 bp, Homo sapiens
ccaggagaaaaagaaacgtgagagatcgtataa

SEQ ID NO: 39200 - DNA, 33 bp, Homo sapiens
gcaatagctgttggcactcaaaaatatgagaga

SEQ ID NO: 39201 - DNA, 33 bp, Homo sapiens
aggcattcaggtttaactaccatgttttggtag

SEQ ID NO: 39202 - DNA, 33 bp, Homo sapiens
ccttttgtcagatttagccacaaacatttcata

SEQ ID NO: 39203 - DNA, 33 bp, Homo sapiens
aaattatagcaaggaacatgaattctcagacat

SEQ ID NO: 39204 - DNA, 33 bp, Homo sapiens
gagatttccttatataacctgagtgaataagct

SEQ ID NO: 39205 - DNA, 51 bp, Homo sapiens
tgctctcagcaatttgcaagatggaatactatatttttaaaaatcaggtaa

SEQ ID NO: 39206 - DNA, 51 bp, Homo sapiens
taccaaataaatgctcagtttcaccagctctcttacactaatgtgaacact

SEQ ID NO: 39207 - DNA, 33 bp, Homo sapiens
aggtcattttttgctaggatgataaataaagga

SEQ ID NO: 39208 - DNA, 33 bp, Homo sapiens
tggatcataatctggccgaatttctgtgctgtg

SEQ ID NO: 39209 - DNA, 33 bp, Homo sapiens
agcaataagatatccaactctaatctgactcca

SEQ ID NO: 39210 - DNA, 33 bp, Homo sapiens
agaatccaaaataaaacggtgctgtttatgaga

SEQ ID NO: 39211 - DNA, 33 bp, Homo sapiens
actataatttgaaggcacctaatttgccttgag

SEQ ID NO: 39212 - DNA, 33 bp, Homo sapiens
aagtagtcaaaaccaactcatggctagagtata

SEQ ID NO: 39213 - DNA, 33 bp, Homo sapiens
gtagttatcggtagtcaatctagttgcagagac

SEQ ID NO: 39214 - DNA, 51 bp, Homo sapiens
acaccatgaagtttattctctagcaaaattgatgattgtacttctaacaga

SEQ ID NO: 39215 - DNA, 33 bp, Homo sapiens
aactatttaactagagaacccttatcatgcttt

SEQ ID NO: 39216 - DNA, 33 bp, Homo sapiens
ggaaaggaattaacaaagagcatgaaggtatct

SEQ ID NO: 39217 - DNA, 51 bp, Homo sapiens
ttcccttcaaattcagaaattttaccaaggcatttataggcttgaagcttc

SEQ ID NO: 39218 - DNA, 33 bp, Homo sapiens
tgaaaatacactctaaaccatatcttaaccaat

SEQ ID NO: 39219 - DNA, 33 bp, Homo sapiens
agagcaaaatttggcactgaatcattgttcaaa

SEQ ID NO: 39220 - DNA, 33 bp, Homo sapiens
gatatacaagcaagaaagtaaagtcataataac

SEQ ID NO: 39221 - DNA, 33 bp, Homo sapiens
taaaaattttcaccaccgaatcccataaattaa

SEQ ID NO: 39222 - DNA, 33 bp, Homo sapiens
tagagtatcatctgacacataggaataattaac

SEQ ID NO: 39223 - DNA, 33 bp, Homo sapiens
ttttcccatcaaaagaaaggaggatttagatga

SEQ ID NO: 39224 - DNA, 33 bp, Homo sapiens
aggtagtaacagggataagaatagcctcctgcc

SEQ ID NO: 39225 - DNA, 33 bp, Homo sapiens
atatgtggtttttaaaatgttgttgaatcggcc

SEQ ID NO: 39226 - DNA, 33 bp, Homo sapiens
tacattctgcattgtacctttcttgaccttatg

SEQ ID NO: 39227 - DNA, 51 bp, Homo sapiens
cagatcttcttcctcctacacagaactattttttgctaagtctttgcaaaa

SEQ ID NO: 39228 - DNA, 33 bp, Homo sapiens
atattcaccatatactcaggccacagagttaaa

SEQ ID NO: 39229 - DNA, 33 bp, Homo sapiens
gaaaattaataaggacacattttttacagccat

SEQ ID NO: 39230 - DNA, 33 bp, Homo sapiens
ccataatctatttggccagaaaggttgattcat

SEQ ID NO: 39231 - DNA, 33 bp, Homo sapiens
ctcctccaacaaagaaactagtcagttggataa

SEQ ID NO: 39232 - DNA, 33 bp, Homo sapiens
ggattttgagaataacagcagaaacaaacctac

SEQ ID NO: 39233 - DNA, 33 bp, Homo sapiens
taattaacattcagccactaaaccaggaccaaa

SEQ ID NO: 39234 - DNA, 33 bp, Homo sapiens
gttgctagcgaacatacatttaggctgtgggcc

SEQ ID NO: 39235 - DNA, 33 bp, Homo sapiens
tatatttagaccaaaaatttatcaaggatggca

SEQ ID NO: 39236 - DNA, 33 bp, Homo sapiens
catcatcatgactggaaataatgcctgaaattg

SEQ ID NO: 39237 - DNA, 51 bp, Homo sapiens
tcactgatgattcatatataagccacgtggactcaaataaattctcatcct

SEQ ID NO: 39238 - DNA, 33 bp, Homo sapiens
tccaagctaaaaaaaaacgcatatattattgaa

SEQ ID NO: 39239 - DNA, 33 bp, Homo sapiens
aaggtaacatattaaaccaccaacacaatgcct

SEQ ID NO: 39240 - DNA, 33 bp, Homo sapiens
tccactgagaaattacagcttccatttatcaca

SEQ ID NO: 39241 - DNA, 33 bp, Homo sapiens
catttttctgtggtagacaatatgctagatgtc

SEQ ID NO: 39242 - DNA, 33 bp, Homo sapiens
tcctcccctgtgtctcagaaaccacacaaaatt

SEQ ID NO: 39243 - DNA, 33 bp, Homo sapiens
gtggtagtgtccttcagatgctcacaggaaggt

SEQ ID NO: 39244 - DNA, 33 bp, Homo sapiens
gtattttagaaatagcaaaacataacaaagtga

SEQ ID NO: 39245 - DNA, 33 bp, Homo sapiens
ttctggtctgaaatacactaaaagtgaggagca

SEQ ID NO: 39246 - DNA, 33 bp, Homo sapiens
ctcaggaatggtgggaatcagcaatgtgttgtg

SEQ ID NO: 39247 - DNA, 33 bp, Homo sapiens
atataaataaactccaaatatttacacaacaca

SEQ ID NO: 39248 - DNA, 33 bp, Homo sapiens
agaaaaagtgtccgtcaaagcccttgctcacct

SEQ ID NO: 39249 - DNA, 33 bp, Homo sapiens
gtaatggaatcataaacccaaaatcatagagcc

SEQ ID NO: 39250 - DNA, 33 bp, Homo sapiens
tcttgctttgttcatacgtagcacagttgaaat

SEQ ID NO: 39251 - DNA, 33 bp, Homo sapiens
gcagctggcatgctaaagtgtcatacctagaac

SEQ ID NO: 39252 - DNA, 51 bp, Homo sapiens
ttccttgagtctacttagaattagcgctttcactggtaaaaagtttattcc

SEQ ID NO: 39253 - DNA, 33 bp, Homo sapiens
aatagagttacccacaagaaactggaaatcgag

SEQ ID NO: 39254 - DNA, 33 bp, Homo sapiens
agaagatttagggatcaataagcaaggacttta

SEQ ID NO: 39255 - DNA, 33 bp, Homo sapiens
gggttctcagaggcaaattcagaccgtgttgtt

SEQ ID NO: 39256 - DNA, 33 bp, Homo sapiens
gaagaggaagaaagcaaaatcattcctatctga

SEQ ID NO: 39257 - DNA, 33 bp, Homo sapiens
gtatttgttgcaaaagaatgctatcccaagtca

SEQ ID NO: 39258 - DNA, 33 bp, Homo sapiens
tgtgaacctcataattgaagtattttcagcaaa

SEQ ID NO: 39259 - DNA, 33 bp, Homo sapiens
aggtaaggatgctcaacaaagggaatttgacta

SEQ ID NO: 39260 - DNA, 33 bp, Homo sapiens
ctgagtcatgcaattgaagggaatcccattttc

SEQ ID NO: 39261 - DNA, 33 bp, Homo sapiens
gggctgagtttgtgacaagagggaaaacacaaa

SEQ ID NO: 39262 - DNA, 33 bp, Homo sapiens
atgacatgattctagccctagagaagttgagaa

SEQ ID NO: 39263 - DNA, 33 bp, Homo sapiens
ccagtagcatcccaagcatctgaatgaggaggg

SEQ ID NO: 39264 - DNA, 51 bp, Homo sapiens
cttgctgttatcttagtgtttataactaagggatccaagtcaactttgttg

SEQ ID NO: 39265 - DNA, 33 bp, Homo sapiens
atatatgtttaaagtccgaactggaatgtctgg

SEQ ID NO: 39266 - DNA, 51 bp, Homo sapiens
tgatcaaggtaggatctaaacatcaatcttcataaatccagaatctcaatt

SEQ ID NO: 39267 - DNA, 33 bp, Homo sapiens
agttgtactgaggttaagggatggactcaaggc

SEQ ID NO: 39268 - DNA, 51 bp, Homo sapiens
tacactcactaagatggaagaaggcactgggatcctggaacaagggaagga

SEQ ID NO: 39269 - DNA, 33 bp, Homo sapiens
tggaaccacagaggctaaaagattggtctgtta

SEQ ID NO: 39270 - DNA, 33 bp, Homo sapiens
aacattctagctaagaacccatcaataacacaa

SEQ ID NO: 39271 - DNA, 33 bp, Homo sapiens
tctacagaaccataaacgctcttgaactcatca

SEQ ID NO: 39272 - DNA, 33 bp, Homo sapiens
tcctagcataatcaccacatcgaagcaatttcc

SEQ ID NO: 39273 - DNA, 33 bp, Homo sapiens
aattttccagtctctaccatgaagcaaggactc

SEQ ID NO: 39274 - DNA, 33 bp, Homo sapiens
taacatatccctgaggcaaaaccctgcaacttc

SEQ ID NO: 39275 - DNA, 33 bp, Homo sapiens
ctgcctatggcttatgaatatctgttttgcatt

SEQ ID NO: 39276 - DNA, 51 bp, Homo sapiens
attcagtaaaagatgcagtcactaccattctaaaaaccttaattaagtaat

SEQ ID NO: 39277 - DNA, 33 bp, Homo sapiens
agttgagcaacaagaaagtgaaaggaaatttag

SEQ ID NO: 39278 - DNA, 33 bp, Homo sapiens
tctgaggtgggcctaaaaatccggatttctaac

SEQ ID NO: 39279 - DNA, 33 bp, Homo sapiens
ttcccaacagcataacaagtgtaattttatggg

SEQ ID NO: 39280 - DNA, 51 bp, Homo sapiens
attattcttttgaactgaaagtcaggagaccttgattttagactcactcca

SEQ ID NO: 39281 - DNA, 33 bp, Homo sapiens
tgccttagaagagtccaatgcattcacatagca

SEQ ID NO: 39282 - DNA, 51 bp, Homo sapiens
tagctagaatttattgaaaacccaccatatgcaagattctaggcccttctt

SEQ ID NO: 39283 - DNA, 51 bp, Homo sapiens
cctattgtagttaaatttgtaatccagataattatataaaagcacagttat

SEQ ID NO: 39284 - DNA, 51 bp, Homo sapiens
gagatacagttactctttcaatccaatagagaccacttgatttaccactct

SEQ ID NO: 39285 - DNA, 33 bp, Homo sapiens
ttcaaagagctatttcacctattcccgtgcctc

SEQ ID NO: 39286 - DNA, 33 bp, Homo sapiens
atctaccatgtgatcaagtttaacatcatcgtg

SEQ ID NO: 39287 - DNA, 33 bp, Homo sapiens
ggacaatgtgcaataaaggttttcatgtcctct

SEQ ID NO: 39288 - DNA, 33 bp, Homo sapiens
gccagctcattactaccaggttagctctcaggt

SEQ ID NO: 39289 - DNA, 33 bp, Homo sapiens
ggagttgagtttaggacacctggctatatgatc

SEQ ID NO: 39290 - DNA, 33 bp, Homo sapiens
gtacttggtgtagttacaggaagagcactgaaa

SEQ ID NO: 39291 - DNA, 33 bp, Homo sapiens
ttctccttgaaacagacgtaaaaatttgaaatt

SEQ ID NO: 39292 - DNA, 51 bp, Homo sapiens
agtcagtttaatacgaagcaaaaaccttctctcatttgtgcagccggatgg

SEQ ID NO: 39293 - DNA, 33 bp, Homo sapiens
gatggtcatgatcagtgaactttgccagtatct

SEQ ID NO: 39294 - DNA, 51 bp, Homo sapiens
tctttcctaaaagttagcttatgtccttggaaatggaaatggaagtggtgg

SEQ ID NO: 39295 - DNA, 51 bp, Homo sapiens
ccagcctacttctgcttatatcccaatggccagaaatgtgttatatcgtta

SEQ ID NO: 39296 - DNA, 51 bp, Homo sapiens
atggttttttaaagaaaagataccacgctgcaaagtctcttgaaaatggga

SEQ ID NO: 39297 - DNA, 51 bp, Homo sapiens
tcactaccatgaaaaaaatgcacctaaaaattaagataaaatttcatcatg

SEQ ID NO: 39298 - DNA, 51 bp, Homo sapiens
taaaaagggcaaagtgctttactacacaaatatcttactgcactttgaaca

SEQ ID NO: 39299 - DNA, 33 bp, Homo sapiens
agaattctgcattttacgtgaaaaacagcttgt

SEQ ID NO: 39300 - DNA, 33 bp, Homo sapiens
gtgtgaattcagaaataaagttggatttacatt

SEQ ID NO: 39301 - DNA, 51 bp, Homo sapiens
tttttctctgtaactctaatcagaaataatctgtcaagcagtcaatttatc

SEQ ID NO: 39302 - DNA, 51 bp, Homo sapiens
acaaagcttgttactctaatgaagacattttatcactttgtctattaatat

SEQ ID NO: 39303 - DNA, 51 bp, Homo sapiens
caaattaaaatagctattataaaaaagacgagatatatgtaggcaaaggtg

SEQ ID NO: 39304 - DNA, 33 bp, Homo sapiens
ttgtattcccggtgtaccagaaattgtgctttg

SEQ ID NO: 39305 - DNA, 33 bp, Homo sapiens
cctttatatggaataacgagaggtctgagaaaa

SEQ ID NO: 39306 - DNA, 33 bp, Homo sapiens
aaacttagctattgaacgttagagttaggccat

SEQ ID NO: 39307 - DNA, 33 bp, Homo sapiens
ttgcaaactgtacatacggcaaaggtctaatat

SEQ ID NO: 39308 - DNA, 33 bp, Homo sapiens
ttaaggtgtgcaaatagcttatccaaacaaaca

SEQ ID NO: 39309 - DNA, 33 bp, Homo sapiens
tgttaactatttgaacgggttgagaagtctcct

SEQ ID NO: 39310 - DNA, 33 bp, Homo sapiens
gcatgattgtcaaacactgtgatagagggtagt

SEQ ID NO: 39311 - DNA, 33 bp, Homo sapiens
caggttctggaggtcaagattgattatcagctg

SEQ ID NO: 39312 - DNA, 33 bp, Homo sapiens
aatggaaagccagtaacgaggctaggggcttgg

SEQ ID NO: 39313 - DNA, 33 bp, Homo sapiens
ttgtgttcagcatttacggtatattggagagta

SEQ ID NO: 39314 - DNA, 33 bp, Homo sapiens
ctctctacaagggcaaaacagagaggaaatatg

SEQ ID NO: 39315 - DNA, 33 bp, Homo sapiens
aaattagagatgaagtaaagtatcaaatagaca

SEQ ID NO: 39316 - DNA, 33 bp, Homo sapiens
taatctctggccttaaatagtgactcaaagtag

SEQ ID NO: 39317 - DNA, 33 bp, Homo sapiens
atagaggcacacgatacaggatcaacatataaa

SEQ ID NO: 39318 - DNA, 33 bp, Homo sapiens
tttaataaaaaatcacaaaacctgcaaagaaac

SEQ ID NO: 39319 - DNA, 33 bp, Homo sapiens
tgcattgcttggattcgacacttgaagtccata

SEQ ID NO: 39320 - DNA, 33 bp, Homo sapiens
gatttggccccactccaactttcattcgtatta

SEQ ID NO: 39321 - DNA, 33 bp, Homo sapiens
tagcattctgacagagaacttaagcagagatgt

SEQ ID NO: 39322 - DNA, 33 bp, Homo sapiens
ttggttataaattctgaactttcgtgaattatt

SEQ ID NO: 39323 - DNA, 33 bp, Homo sapiens
gagttgtcagtcgacactaaatgaaaagaagga

SEQ ID NO: 39324 - DNA, 33 bp, Homo sapiens
agatcagcaaacctaaactcacaggccaaagaa

SEQ ID NO: 39325 - DNA, 51 bp, Homo sapiens
tccacacttataaatgcagtagttacaggctttggtaatgagatcatgaat

SEQ ID NO: 39326 - DNA, 51 bp, Homo sapiens
ccctgccacctgttttttcttctcccgaatgcatttactgtgttacttctg

SEQ ID NO: 39327 - DNA, 51 bp, Homo sapiens
gtgtcctctcttctaagctccaaaacaactgtagtctcaagatgaagttac

SEQ ID NO: 39328 - DNA, 33 bp, Homo sapiens
tacttcaacaatgtgaactctagctgccgccaa

SEQ ID NO: 39329 - DNA, 33 bp, Homo sapiens
cttcttttagtaggcaagttatcctgaaaatta

SEQ ID NO: 39330 - DNA, 33 bp, Homo sapiens
aataaatcttttcctacagttttggcacaatca

SEQ ID NO: 39331 - DNA, 33 bp, Homo sapiens
ttgcagctgaaaaagcacaaagtagaggaactc

SEQ ID NO: 39332 - DNA, 33 bp, Homo sapiens
tttgtgtactacacacactctgttgcaactact

SEQ ID NO: 39333 - DNA, 33 bp, Homo sapiens
ttgtccttttttgttccactgatgtcctattca

SEQ ID NO: 39334 - DNA, 33 bp, Homo sapiens
tttaaacaactctcacacaaaatttaataataa

SEQ ID NO: 39335 - DNA, 33 bp, Homo sapiens
tcacacaatgctggaaatcctctaatattttat

SEQ ID NO: 39336 - DNA, 33 bp, Homo sapiens
tgagcctcactaccagcatttctgggtcaccag

SEQ ID NO: 39337 - DNA, 51 bp, Homo sapiens
acatatattgaacaccatggcatcacagtgatatctccaatttcagtctaa

SEQ ID NO: 39338 - DNA, 33 bp, Homo sapiens
acaggatctgctatgaagaaaatggaaaggagt

SEQ ID NO: 39339 - DNA, 51 bp, Homo sapiens
aacctgtcctttgacgctttgaagccaaacattgacttctcttctctagct

SEQ ID NO: 39340 - DNA, 33 bp, Homo sapiens
gctatttttctgaaacacacaccattttataat

SEQ ID NO: 39341 - DNA, 33 bp, Homo sapiens
atgtcacaccagctggcaaaggagaaatgtttt

SEQ ID NO: 39342 - DNA, 51 bp, Homo sapiens
aggtctaaaatgtgtacatttataaatcatatactaatgagtcacatctca

SEQ ID NO: 39343 - DNA, 33 bp, Homo sapiens
aaagaacaaaacctcaaagaagatttaacaacc

SEQ ID NO: 39344 - DNA, 33 bp, Homo sapiens
tagggaaagaggaatacacaaacgtttggaaga

SEQ ID NO: 39345 - DNA, 33 bp, Homo sapiens
aatagaggaaatttaaaagagtgaatatttgca

SEQ ID NO: 39346 - DNA, 33 bp, Homo sapiens
ttacagtaggtattaactgttcagcatcttaag

SEQ ID NO: 39347 - DNA, 33 bp, Homo sapiens
ctatgacaatatctgaaagaatgaatggatacc

SEQ ID NO: 39348 - DNA, 33 bp, Homo sapiens
tgcgtcttggtttctaatacaggaagtgacatt

SEQ ID NO: 39349 - DNA, 51 bp, Homo sapiens
ccctgtaaatgtaattgcctaacaagtattagttgccattagtaaatgagc

SEQ ID NO: 39350 - DNA, 33 bp, Homo sapiens
gtccctgacttccagacggtatctctggaccag

SEQ ID NO: 39351 - DNA, 33 bp, Homo sapiens
actgcctgcagatgcactcattacttcctacct

SEQ ID NO: 39352 - DNA, 33 bp, Homo sapiens
ttaaataagggaagaacagctcaagatgagatg

SEQ ID NO: 39353 - DNA, 33 bp, Homo sapiens
gcttgttcctgttagaaaattacatatatcagg

SEQ ID NO: 39354 - DNA, 33 bp, Homo sapiens
gagtccatgttcaacaacctcattttggtcaga

SEQ ID NO: 39355 - DNA, 51 bp, Homo sapiens
agaatttaaaaggaacacatgacaactatattgaggcatcaaatgtagata

SEQ ID NO: 39356 - DNA, 33 bp, Homo sapiens
acagctggcttctccaacatcctgggttcctta

SEQ ID NO: 39357 - DNA, 33 bp, Homo sapiens
ggacagctttttccggacaaagaaagcagaaaa

SEQ ID NO: 39358 - DNA, 33 bp, Homo sapiens
gagatatcttggtatacgccctttcaacctctc

SEQ ID NO: 39359 - DNA, 33 bp, Homo sapiens
gaataatatagatgtgcatttaggtaaagaagt

SEQ ID NO: 39360 - DNA, 33 bp, Homo sapiens
tgaatccacgaccacaaagaaaacagcagaact

SEQ ID NO: 39361 - DNA, 33 bp, Homo sapiens
attcagatactgagaaactttagagaaattccc

SEQ ID NO: 39362 - DNA, 33 bp, Homo sapiens
tgaggcattgtactgacagagtggtgtagcaag

SEQ ID NO: 39363 - DNA, 33 bp, Homo sapiens
catttgaaatttttgcaacctcatgatactaag

SEQ ID NO: 39364 - DNA, 33 bp, Homo sapiens
ctcatttctaagcaaagtcatcgcccaaacaaa

SEQ ID NO: 39365 - DNA, 33 bp, Homo sapiens
tccactgattttcagcaaagtatatattgggaa

SEQ ID NO: 39366 - DNA, 51 bp, Homo sapiens
ctagcatgtaggaaaacttccacccgaattttgaattgtcccatgtaacag

SEQ ID NO: 39367 - DNA, 33 bp, Homo sapiens
tcattaagcccatccacaactttataactcagt

SEQ ID NO: 39368 - DNA, 33 bp, Homo sapiens
tgctcgcaggttatagaagagacataagtaggc

SEQ ID NO: 39369 - DNA, 33 bp, Homo sapiens
ggttgtaggatgtgggaaataggtgagtctaca

SEQ ID NO: 39370 - DNA, 33 bp, Homo sapiens
agttagcatattatcaatccacagtgcaggaaa

SEQ ID NO: 39371 - DNA, 51 bp, Homo sapiens
gacctgaaaccataaaagacatagaagataacatcagaaaaaacctcctag

SEQ ID NO: 39372 - DNA, 33 bp, Homo sapiens
aattatacataacacccctgtagccctgtggct

SEQ ID NO: 39373 - DNA, 33 bp, Homo sapiens
agtgggtgtggctatgaaaaggaaaaatgagtc

SEQ ID NO: 39374 - DNA, 33 bp, Homo sapiens
tcagtattctcatgtacaaagcagtagtcatat

SEQ ID NO: 39375 - DNA, 33 bp, Homo sapiens
gtatgtgttctaaaaaaaatgaatgtatccatg

SEQ ID NO: 39376 - DNA, 33 bp, Homo sapiens
actggcctgaaattcgaaagactcagtagtttg

SEQ ID NO: 39377 - DNA, 33 bp, Homo sapiens
aaattacacagcaacaacgaggacaacaggcaa

SEQ ID NO: 39378 - DNA, 33 bp, Homo sapiens
cgtgcactcagaaatcaatgtataacttttgac

SEQ ID NO: 39379 - DNA, 33 bp, Homo sapiens
ggtattattgtctatgcataccaatgtggctga

SEQ ID NO: 39380 - DNA, 51 bp, Homo sapiens
aaacgattcaagggcagtttttcacagcaccttgatgaaggtggaacaaag

SEQ ID NO: 39381 - DNA, 51 bp, Homo sapiens
aataatgctacagatcccttagaacagactagaaaatgtattcagcatttt

SEQ ID NO: 39382 - DNA, 51 bp, Homo sapiens
tatattagtggcatgtcagttcccacgattgtacacatagtttcaaacatc

SEQ ID NO: 39383 - DNA, 51 bp, Homo sapiens
gcgagtttgcagttacattgctgagaactgcatatttttctgttttgttta

SEQ ID NO: 39384 - DNA, 33 bp, Homo sapiens
tacatcctagacctaaggtacaagctgaaacta

SEQ ID NO: 39385 - DNA, 33 bp, Homo sapiens
tccaccctatatttcccgctttctctctgacca

SEQ ID NO: 39386 - DNA, 33 bp, Homo sapiens
ctgagcaactggctaaactctatctgcacccgg

SEQ ID NO: 39387 - DNA, 33 bp, Homo sapiens
aaattgttcaaacctcactatacaaaataaact

SEQ ID NO: 39388 - DNA, 33 bp, Homo sapiens
tgtgtgagaaaactccagaaatttctaaatgca

SEQ ID NO: 39389 - DNA, 33 bp, Homo sapiens
ctccctgtcatcttaccctttgattggagacag

SEQ ID NO: 39390 - DNA, 33 bp, Homo sapiens
atcacactacactgtcactgtcataactagctg

SEQ ID NO: 39391 - DNA, 33 bp, Homo sapiens
cttttgtccagccacagggttctttagcacatt

SEQ ID NO: 39392 - DNA, 51 bp, Homo sapiens
cactgcctgaagagctgcaagagacaaggaatatcatgaacagtggtatcc

SEQ ID NO: 39393 - DNA, 51 bp, Homo sapiens
tctattttatatttattctagtttacgtattcaatattcttgtcctcccat

SEQ ID NO: 39394 - DNA, 51 bp, Homo sapiens
aaactagaataaatataaaatagaacgatgaatgctaaaatcatggtgtgc

SEQ ID NO: 39395 - DNA, 33 bp, Homo sapiens
tttctggagaagtgcaaatggatcgctcttcat

SEQ ID NO: 39396 - DNA, 33 bp, Homo sapiens
tagatgacaaataaaaatgtgctgtatctgaat

SEQ ID NO: 39397 - DNA, 33 bp, Homo sapiens
ataaattgtctctttaaatgtcagaactaggaa

SEQ ID NO: 39398 - DNA, 33 bp, Homo sapiens
acttggaacagtcaaacgaaattatacttagct

SEQ ID NO: 39399 - DNA, 33 bp, Homo sapiens
tactatttgcctttaacattggagcaatcgaca

SEQ ID NO: 39400 - DNA, 33 bp, Homo sapiens
caaaacactatacatacaaatagtaaacgcata

SEQ ID NO: 39401 - DNA, 33 bp, Homo sapiens
aaagaccaagacaaacccatcttcacagagaaa

SEQ ID NO: 39402 - DNA, 33 bp, Homo sapiens
ctgcaaatttaggctacctgatacagcctagtc

SEQ ID NO: 39403 - DNA, 33 bp, Homo sapiens
ggagcttgtgattctcaaataagcttctgagat

SEQ ID NO: 39404 - DNA, 33 bp, Homo sapiens
aaagaaactcgttccaacattttcaccagcttt

SEQ ID NO: 39405 - DNA, 33 bp, Homo sapiens
gccttatagatgaaagcaccaggtatcagtagg

SEQ ID NO: 39406 - DNA, 51 bp, Homo sapiens
cagtcctatccatgatattaacacaacaatgcttattctggcaaaaaaaaa

SEQ ID NO: 39407 - DNA, 51 bp, Homo sapiens
ctgaatgcccctgttattattaacaaccttattctacacttgaaggagctg

SEQ ID NO: 39408 - DNA, 33 bp, Homo sapiens
gacaaaaggatcaaaccgtttccaagtcactta

SEQ ID NO: 39409 - DNA, 33 bp, Homo sapiens
caaatagaatttaggaagtcttctgtacaaata

SEQ ID NO: 39410 - DNA, 51 bp, Homo sapiens
aaaattgtagatggacctctaattacattttatctttccaggggagagcaa

SEQ ID NO: 39411 - DNA, 33 bp, Homo sapiens
caccctccgaaggttcaaggctatttgtgttcg

SEQ ID NO: 39412 - DNA, 33 bp, Homo sapiens
aagccacttttcatgacgtagcatagacttcct

SEQ ID NO: 39413 - DNA, 51 bp, Homo sapiens
tagtttataaattgtaatcctaatccataatgtgatgaaaatggtcaatga

SEQ ID NO: 39414 - DNA, 33 bp, Homo sapiens
ctcagtagtcaaaatacctgtagtaggaagcca

SEQ ID NO: 39415 - DNA, 33 bp, Homo sapiens
aaaaacaggacaacaaaaagtcaccatagcctt

SEQ ID NO: 39416 - DNA, 33 bp, Homo sapiens
tgatgcgtatccaacaaacacttgcaaatgtac

SEQ ID NO: 39417 - DNA, 33 bp, Homo sapiens
gtggtggaaagagcaccacactgagattacaaa

SEQ ID NO: 39418 - DNA, 33 bp, Homo sapiens
gaaaagaccattatcaacaagaagctggggaag

SEQ ID NO: 39419 - DNA, 33 bp, Homo sapiens
gttcttggcttcatcacggaaagaattcaaagg

SEQ ID NO: 39420 - DNA, 33 bp, Homo sapiens
cctgccaggagtaaccaaggaagccaaccctga

SEQ ID NO: 39421 - DNA, 33 bp, Homo sapiens
ctgtaatggtctctgagtaggcatttctgctag

SEQ ID NO: 39422 - DNA, 33 bp, Homo sapiens
gttcttcattacagacactggcaacaagcctaa

SEQ ID NO: 39423 - DNA, 33 bp, Homo sapiens
aaattaacagaggttaaactgaggaagagaaat

SEQ ID NO: 39424 - DNA, 33 bp, Homo sapiens
agaacaatgtgaaacaagaagtgtctagagatg

SEQ ID NO: 39425 - DNA, 33 bp, Homo sapiens
caatcatcaccaatctaacaaatttgacctgaa

SEQ ID NO: 39426 - DNA, 33 bp, Homo sapiens
actaaggaaacttatacagagtgctgcagcaat

SEQ ID NO: 39427 - DNA, 33 bp, Homo sapiens
ttttcgaaatggtagacgaacactgaactcaaa

SEQ ID NO: 39428 - DNA, 33 bp, Homo sapiens
tgctataacaaaactcaaagcatctaacaattc

SEQ ID NO: 39429 - DNA, 33 bp, Homo sapiens
aagttcatacagcttcacaaagattagatataa

SEQ ID NO: 39430 - DNA, 51 bp, Homo sapiens
gaaggaattggaaagcaataaaaaccgaactagtccaagaaggctttatgg

SEQ ID NO: 39431 - DNA, 51 bp, Homo sapiens
taaaatccatccaaatgacttaaaaaaggaagtagaaatggaataaactta

SEQ ID NO: 39432 - DNA, 33 bp, Homo sapiens
agcggtcctgcaggatcaaagtagactaaagca

SEQ ID NO: 39433 - DNA, 33 bp, Homo sapiens
aagaacactccatttaccaaagcaataaccaat

SEQ ID NO: 39434 - DNA, 33 bp, Homo sapiens
gggtaagctactgctacctatttctgaggttat

SEQ ID NO: 39435 - DNA, 33 bp, Homo sapiens
cacagggtgaccatgcactctgtggcttccctg

SEQ ID NO: 39436 - DNA, 51 bp, Homo sapiens
aggggtcaatcatgatgtttctggtatagggaagagtttggaatgcatcct

SEQ ID NO: 39437 - DNA, 33 bp, Homo sapiens
tggacagagaatccccccggttaattcaattca

SEQ ID NO: 39438 - DNA, 33 bp, Homo sapiens
taaatattcttctgccactaatccaccctttat

SEQ ID NO: 39439 - DNA, 33 bp, Homo sapiens
catgacaatgcaccataagcgtttactattatg

SEQ ID NO: 39440 - DNA, 51 bp, Homo sapiens
gatgaagatatcatctttcaaacagagaatcagaatcaccacctgaggaag

SEQ ID NO: 39441 - DNA, 33 bp, Homo sapiens
cagtaaggtccccaaccatatacagtgttctaa

SEQ ID NO: 39442 - DNA, 33 bp, Homo sapiens
tcacagtttaacataccaagactttcactatct

SEQ ID NO: 39443 - DNA, 51 bp, Homo sapiens
aaaaacagtattgttgtctcagtacaattagattaaaagagtacaggacta

SEQ ID NO: 39444 - DNA, 33 bp, Homo sapiens
ttatgttattgtttcaaggtaacttttcttctt

SEQ ID NO: 39445 - DNA, 33 bp, Homo sapiens
ataagctcccatatgaccggaaactgaagacat

SEQ ID NO: 39446 - DNA, 33 bp, Homo sapiens
cagtcaagagatacctgaacagtctggccttgg

SEQ ID NO: 39447 - DNA, 33 bp, Homo sapiens
tattacagatttaccacgtgcgagcttctattc

SEQ ID NO: 39448 - DNA, 33 bp, Homo sapiens
tggcttttttctctgcccaagtgtggagagaaa

SEQ ID NO: 39449 - DNA, 33 bp, Homo sapiens
gaataacaatgttgcacattaacacatcttccc

SEQ ID NO: 39450 - DNA, 33 bp, Homo sapiens
ttactaatggattagacgtgtggaacaaggcac

SEQ ID NO: 39451 - DNA, 51 bp, Homo sapiens
gaaaattatgtccgtaactaaccaaagggtgaattgtccatcacagcagtg

SEQ ID NO: 39452 - DNA, 33 bp, Homo sapiens
gcttggggaatgtgtacgagtctgctggtgctg

SEQ ID NO: 39453 - DNA, 33 bp, Homo sapiens
ctcttaaggcctttacaaggttggcagaagagt

SEQ ID NO: 39454 - DNA, 33 bp, Homo sapiens
gatcttctgtttaagccgaagcctggggaaaga

SEQ ID NO: 39455 - DNA, 33 bp, Homo sapiens
gaagtgcttccttaaaaagttcaatatgaattg

SEQ ID NO: 39456 - DNA, 33 bp, Homo sapiens
tcacctccaattcctacaccaactacatagaat

SEQ ID NO: 39457 - DNA, 33 bp, Homo sapiens
tagaatttttcacaaaactgaatggtattcatc

SEQ ID NO: 39458 - DNA, 33 bp, Homo sapiens
atctactgtgaatatcactagaacacaaaatag

SEQ ID NO: 39459 - DNA, 33 bp, Homo sapiens
ctgtgcaatattaagaaaatagctttcacaaac

SEQ ID NO: 39460 - DNA, 33 bp, Homo sapiens
gaatgaataaaggctacctacaaggggctcaga

SEQ ID NO: 39461 - DNA, 51 bp, Homo sapiens
gtgtgtgtgtttgaattagtggtatcagaggctctattgactttaattttg

SEQ ID NO: 39462 - DNA, 33 bp, Homo sapiens
aaagcatgggcttgaaaggtttggagtcaaaat

SEQ ID NO: 39463 - DNA, 33 bp, Homo sapiens
taggatcctggttccccgatcacatggtgaaac

SEQ ID NO: 39464 - DNA, 33 bp, Homo sapiens
accttgtggctcaacacggctgctacactccag

SEQ ID NO: 39465 - DNA, 33 bp, Homo sapiens
atatttgcataaacagcatagtatctagcagtt

SEQ ID NO: 39466 - DNA, 33 bp, Homo sapiens
cagttaagattttcaccggctactttgcttccc

SEQ ID NO: 39467 - DNA, 33 bp, Homo sapiens
gtgtggatttgactcacactaaaccaaatctat

SEQ ID NO: 39468 - DNA, 33 bp, Homo sapiens
gtggactctggaaaacacaagaaatatccattt

SEQ ID NO: 39469 - DNA, 33 bp, Homo sapiens
ttctcacattagaagcactggcaagagatgttt

SEQ ID NO: 39470 - DNA, 33 bp, Homo sapiens
acttgatgcgaaccaacggtagacccgctcatc

SEQ ID NO: 39471 - DNA, 33 bp, Homo sapiens
aaccttcttaatttcacgatctcagtatcaaat

SEQ ID NO: 39472 - DNA, 33 bp, Homo sapiens
ccagaggctgcagagacagtaacatggagaatt

SEQ ID NO: 39473 - DNA, 33 bp, Homo sapiens
ggagtatataagagaaaaacattgctttgtgtg

SEQ ID NO: 39474 - DNA, 33 bp, Homo sapiens
cacaggaaatgcataacaccagtgactcgaggc

SEQ ID NO: 39475 - DNA, 33 bp, Homo sapiens
tcctaagaaccaggggaatgaggagagcttcgg

SEQ ID NO: 39476 - DNA, 33 bp, Homo sapiens
gcttaaaattggatgcagacccagaagattgta

SEQ ID NO: 39477 - DNA, 33 bp, Homo sapiens
tggtgtacagactgaacaccagatccagaaagt

SEQ ID NO: 39478 - DNA, 33 bp, Homo sapiens
gttttttctggttcaactgggggaaatttggtt

SEQ ID NO: 39479 - DNA, 33 bp, Homo sapiens
caggccatccaagtcacataaggtggagtaatg

SEQ ID NO: 39480 - DNA, 51 bp, Homo sapiens
ggatggatatgaagagatactagaaagtggaatagtgagccagcaatagtg

SEQ ID NO: 39481 - DNA, 33 bp, Homo sapiens
gtgtttttagggtgtacataagtggaatgatta

SEQ ID NO: 39482 - DNA, 33 bp, Homo sapiens
ctccagaaacttgccaatctacccataaaggct

SEQ ID NO: 39483 - DNA, 33 bp, Homo sapiens
tttaaggatgtatctacgccactctgaccttca

SEQ ID NO: 39484 - DNA, 33 bp, Homo sapiens
aatccccaaggctgtaacaagtatctctgctac

SEQ ID NO: 39485 - DNA, 33 bp, Homo sapiens
agtttcctgtctggacactagaaataacaacaa

SEQ ID NO: 39486 - DNA, 33 bp, Homo sapiens
cacagcactatgctcactctccagtctttgccc

SEQ ID NO: 39487 - DNA, 33 bp, Homo sapiens
ctgctccctgccaccactctgagactactctcg

SEQ ID NO: 39488 - DNA, 33 bp, Homo sapiens
actcacagtgcgttaaagatccaactgtgaaca

SEQ ID NO: 39489 - DNA, 33 bp, Homo sapiens
gccagaattaaccagaagtctgaaaggccaatg

SEQ ID NO: 39490 - DNA, 33 bp, Homo sapiens
tggaccatgttaatcaaatcagtttgttccaac

SEQ ID NO: 39491 - DNA, 33 bp, Homo sapiens
tgtaaggataggttaaactgccattcctaagca

SEQ ID NO: 39492 - DNA, 33 bp, Homo sapiens
tcatttatccaggcaaagttactagggctatag

SEQ ID NO: 39493 - DNA, 33 bp, Homo sapiens
acttctgtgtgttttcaaaagttcaggcgtgca

SEQ ID NO: 39494 - DNA, 33 bp, Homo sapiens
atgaattcaatacaagaagttaaacttacacaa

SEQ ID NO: 39495 - DNA, 33 bp, Homo sapiens
tgagatactgggtgtgaaagtgttctttaagaa

SEQ ID NO: 39496 - DNA, 33 bp, Homo sapiens
acttttattttagatacgcgtgtacatatgcag

SEQ ID NO: 39497 - DNA, 33 bp, Homo sapiens
attgaagcacataaccaaagtcatcagcacagg

SEQ ID NO: 39498 - DNA, 33 bp, Homo sapiens
gtatccacattgtctacactacctgcctgttag

SEQ ID NO: 39499 - DNA, 33 bp, Homo sapiens
tcaggctctcaaacaacagtttcagaaaaaagt

SEQ ID NO: 39500 - DNA, 33 bp, Homo sapiens
gcctgctagagtggtacagtcctgcagtgtcca

SEQ ID NO: 39501 - DNA, 33 bp, Homo sapiens
gaactgtgggaaataaccattgtttaagtcatc

SEQ ID NO: 39502 - DNA, 33 bp, Homo sapiens
gatacaaccccataggaatagacagcatgtact

SEQ ID NO: 39503 - DNA, 33 bp, Homo sapiens
gaatggcacctgttgcacctaagggtcatgtgg

SEQ ID NO: 39504 - DNA, 33 bp, Homo sapiens
ctgtttcaggactcacacagttatcccagggtt

SEQ ID NO: 39505 - DNA, 33 bp, Homo sapiens
ttacagacctgtaataagctttccaacttccca

SEQ ID NO: 39506 - DNA, 51 bp, Homo sapiens
ataaaggatatctacaaaaaacctacacagctacaacacatttaataaatg

SEQ ID NO: 39507 - DNA, 33 bp, Homo sapiens
ggctgccaacacattgcaatttgagaagcatcc

SEQ ID NO: 39508 - DNA, 33 bp, Homo sapiens
aatgggttacaagcaacaatggatcacctccaa

SEQ ID NO: 39509 - DNA, 51 bp, Homo sapiens
aatgatttcagaagtcattttcaagaaatacgtcctttaactggtagatta

SEQ ID NO: 39510 - DNA, 33 bp, Homo sapiens
aaataaattaggggacagattctcatgttggtt

SEQ ID NO: 39511 - DNA, 33 bp, Homo sapiens
caaggcgcactttttccaggaagctttcctgga

SEQ ID NO: 39512 - DNA, 33 bp, Homo sapiens
ttgagtcttcagaacaaggaatcaggaagtctt

SEQ ID NO: 39513 - DNA, 33 bp, Homo sapiens
tcctcccacctcaacaccggaaagttctgggtt

SEQ ID NO: 39514 - DNA, 33 bp, Homo sapiens
tcacagatgcagagaagcccacagagtgcatca

SEQ ID NO: 39515 - DNA, 51 bp, Homo sapiens
cccacacatggcagctgagggtagaggctaagctttatagattactcttgg

SEQ ID NO: 39516 - DNA, 33 bp, Homo sapiens
ctcaatgaattcaagcggctggtggtagtgata

SEQ ID NO: 39517 - DNA, 33 bp, Homo sapiens
tcatcaggcttgtagacggtatggcagatgagc

SEQ ID NO: 39518 - DNA, 33 bp, Homo sapiens
tccattcagcaggtacagagaatctgctttgag

SEQ ID NO: 39519 - DNA, 33 bp, Homo sapiens
accaccactcagctccagattattgcagagctg

SEQ ID NO: 39520 - DNA, 33 bp, Homo sapiens
caaatgcctggccagcagagatcagaggcaaat

SEQ ID NO: 39521 - DNA, 33 bp, Homo sapiens
tggcttccaaatgtccaaacagggtttctctcc

SEQ ID NO: 39522 - DNA, 33 bp, Homo sapiens
agtattaaagaacagcactacactggatgtgac

SEQ ID NO: 39523 - DNA, 33 bp, Homo sapiens
gctacttggtagcacacagacttgggcctgagc

SEQ ID NO: 39524 - DNA, 33 bp, Homo sapiens
tctataagtgattacacaaattttggaacgact

SEQ ID NO: 39525 - DNA, 33 bp, Homo sapiens
ttgagagttcttcctacggtcaaagaaaaggga

SEQ ID NO: 39526 - DNA, 33 bp, Homo sapiens
ctaagaagcctatacaatcatacttcagagata

SEQ ID NO: 39527 - DNA, 33 bp, Homo sapiens
taagagaggagaagagaaaacggtcaggaggca

SEQ ID NO: 39528 - DNA, 33 bp, Homo sapiens
tctaccaggatgacaaacagtttgtggacatgc

SEQ ID NO: 39529 - DNA, 33 bp, Homo sapiens
tgtctaccattgggaccggagacacatcttgta

SEQ ID NO: 39530 - DNA, 33 bp, Homo sapiens
ggaagtagaaaataaaagggtacaggtcagtgt

SEQ ID NO: 39531 - DNA, 33 bp, Homo sapiens
ttgtgcccttatcacccgcaagctctgagatgc

SEQ ID NO: 39532 - DNA, 33 bp, Homo sapiens
ggtccatctgatcacacactagtgtcgttagcc

SEQ ID NO: 39533 - DNA, 33 bp, Homo sapiens
ccagcagcatgacctcccttgacttctctgagc

SEQ ID NO: 39534 - DNA, 33 bp, Homo sapiens
actattctagtaggaaactgactcttaaaaact

SEQ ID NO: 39535 - DNA, 33 bp, Homo sapiens
aatatgtacttctcaccgtattaccatgtaggc

SEQ ID NO: 39536 - DNA, 33 bp, Homo sapiens
atcaggtggaatggtccctcctcttctgacctc

SEQ ID NO: 39537 - DNA, 33 bp, Homo sapiens
cctgcctgccatagaccgagtgtgtgtcttccc

SEQ ID NO: 39538 - DNA, 33 bp, Homo sapiens
cagtacaaagagtaacaccaggcctacctggac

SEQ ID NO: 39539 - DNA, 33 bp, Homo sapiens
agggtgaactgaggagaccacacttatatcagc

SEQ ID NO: 39540 - DNA, 33 bp, Homo sapiens
gggacgttcgcatctcactttccctagagatgg

SEQ ID NO: 39541 - DNA, 33 bp, Homo sapiens
tgaattgaaaacagtacatgccgagataaaatg

SEQ ID NO: 39542 - DNA, 33 bp, Homo sapiens
attggaaatagactgaaggacaggacagagaac

SEQ ID NO: 39543 - DNA, 33 bp, Homo sapiens
gtggctgctcagtggacgatggaccttccaggg

SEQ ID NO: 39544 - DNA, 33 bp, Homo sapiens
taccaaaataactgcaacgtggtgtgtaagtgg

SEQ ID NO: 39545 - DNA, 33 bp, Homo sapiens
aaaaggagagaatggacgttgaactaaactgag

SEQ ID NO: 39546 - DNA, 33 bp, Homo sapiens
catctcttctattcctcaaatatcatacaagtg

SEQ ID NO: 39547 - DNA, 33 bp, Homo sapiens
tatgtgggggcagcagacacatggatactctct

SEQ ID NO: 39548 - DNA, 33 bp, Homo sapiens
tattcctttgaaaaaccaggtaaatagcaagat

SEQ ID NO: 39549 - DNA, 33 bp, Homo sapiens
agtggaagagtagagaaaggagcctgactgcag

SEQ ID NO: 39550 - DNA, 33 bp, Homo sapiens
agctgtgcctggaaccaagagataaatgcataa

SEQ ID NO: 39551 - DNA, 51 bp, Homo sapiens
taaggcccaattctttcatccttctaaattataaagaatgacacagggatg

SEQ ID NO: 39552 - DNA, 33 bp, Homo sapiens
atgtttgataacatagccacctctttctgactt

SEQ ID NO: 39553 - DNA, 33 bp, Homo sapiens
tgttaggcaatctcacagacctggggctttgct

SEQ ID NO: 39554 - DNA, 51 bp, Homo sapiens
tgtcatttctattcacgaggcaaaacctgtatctcagtttggtgaatagtt

SEQ ID NO: 39555 - DNA, 51 bp, Homo sapiens
aacttgctttcaacccagtgatacccatttccaacttctggactctagacc

SEQ ID NO: 39556 - DNA, 33 bp, Homo sapiens
tccaaagcctgtggtacgtaaagacttgtgagg

SEQ ID NO: 39557 - DNA, 33 bp, Homo sapiens
tcctgtacttactacccctatgacacttgtgtt

SEQ ID NO: 39558 - DNA, 33 bp, Homo sapiens
attaataatcagaagaaggccaattaaaaccac

SEQ ID NO: 39559 - DNA, 33 bp, Homo sapiens
ggctgcctcgccgccccgacttcccagcgccgg

SEQ ID NO: 39560 - DNA, 33 bp, Homo sapiens
ctggatggatatgacaataacaatgacatcact

SEQ ID NO: 39561 - DNA, 33 bp, Homo sapiens
tcttagttcaaaagcacaattgtaaaatcccaa

SEQ ID NO: 39562 - DNA, 33 bp, Homo sapiens
aagcatgattggggttaaacatctgccaccatc

SEQ ID NO: 39563 - DNA, 33 bp, Homo sapiens
tattaatgccagcaaacagtctttataggatga

SEQ ID NO: 39564 - DNA, 33 bp, Homo sapiens
tggggctgaaagatgaagtaaatgtaacccaaa

SEQ ID NO: 39565 - DNA, 33 bp, Homo sapiens
cagctaaacagattagaaaaggcttcatgaaga

SEQ ID NO: 39566 - DNA, 33 bp, Homo sapiens
ggattagaagaacctacgtatcagccgggcgca

SEQ ID NO: 39567 - DNA, 33 bp, Homo sapiens
attgatactaacaggaaagattgcctcagttgc

SEQ ID NO: 39568 - DNA, 51 bp, Homo sapiens
acctatctatctatctatctgataaactctttaattgcctggcagtacttg

SEQ ID NO: 39569 - DNA, 51 bp, Homo sapiens
atgcagagggaggtggggatgtctcaagttagcaggtaaaagcaatgttca

SEQ ID NO: 39570 - DNA, 51 bp, Homo sapiens
cccgcagctgttagagggctattcccaagagtttctagggttgaagtttct

SEQ ID NO: 39571 - DNA, 51 bp, Homo sapiens
gcagtatagcaagaccccatctctaccaatattttgaaaaaactagccagg

SEQ ID NO: 39572 - DNA, 33 bp, Homo sapiens
ggagaccataaaggaaaatggaatgattactaa

SEQ ID NO: 39573 - DNA, 33 bp, Homo sapiens
cagaactataagctcccctattctcagagttgg

SEQ ID NO: 39574 - DNA, 33 bp, Homo sapiens
tatctaatgtcttttcccatttacctccctgga

SEQ ID NO: 39575 - DNA, 33 bp, Homo sapiens
gggtagctgcctaataaagcatcaggagattga

SEQ ID NO: 39576 - DNA, 33 bp, Homo sapiens
atgtgataacgtacgccgagggagcctaatcag

SEQ ID NO: 39577 - DNA, 33 bp, Homo sapiens
atttccttaacaaaaactcagattgctattaac

SEQ ID NO: 39578 - DNA, 33 bp, Homo sapiens
atatgtatatcctgaaacacataaaagttgttt

SEQ ID NO: 39579 - DNA, 33 bp, Homo sapiens
tttttaaaagtgttaccctacctctgccgattc

SEQ ID NO: 39580 - DNA, 33 bp, Homo sapiens
gattgtgttcagttcacactttcatgcacccat

SEQ ID NO: 39581 - DNA, 33 bp, Homo sapiens
ttttaagggatgtaaaaatgttgggtggaggtg

SEQ ID NO: 39582 - DNA, 33 bp, Homo sapiens
cctatctgaaatttacgcagtgtcagggtgata

SEQ ID NO: 39583 - DNA, 33 bp, Homo sapiens
tttagaatagcaattaccagttccaatatcccc

SEQ ID NO: 39584 - DNA, 33 bp, Homo sapiens
gagatgagctagccgacggtgacaaagccagtt

SEQ ID NO: 39585 - DNA, 33 bp, Homo sapiens
ttttgtattaccatcacacgagataggtgtgtt

SEQ ID NO: 39586 - DNA, 33 bp, Homo sapiens
ggcaatttggaaaacccgaaaggcaggagacct

SEQ ID NO: 39587 - DNA, 33 bp, Homo sapiens
ttgtaatgcttacaggcatgatgcttagtactt

SEQ ID NO: 39588 - DNA, 33 bp, Homo sapiens
atgttctcagggttgaagtgagggcagctgagc

SEQ ID NO: 39589 - DNA, 33 bp, Homo sapiens
ttagtagtaagtgttccatgtaattttacttta

SEQ ID NO: 39590 - DNA, 33 bp, Homo sapiens
tcgcatctaccccataagagcttaggacagtca

SEQ ID NO: 39591 - DNA, 51 bp, Homo sapiens
agaaatacaggcagctgtctatatccgataggctacagttctggaagtgtg

SEQ ID NO: 39592 - DNA, 33 bp, Homo sapiens
aatactgtcagcagaaggttatctccaagataa

SEQ ID NO: 39593 - DNA, 33 bp, Homo sapiens
ctgacaatataagaaacgagtgggcaactgatg

SEQ ID NO: 39594 - DNA, 33 bp, Homo sapiens
cttcagtctatcaaaaacacatcaagtacacag

SEQ ID NO: 39595 - DNA, 33 bp, Homo sapiens
tgctcagtcttaaacacaatttgggaccgaggg

SEQ ID NO: 39596 - DNA, 33 bp, Homo sapiens
cagaataagatgacttaaacacagtaggaaagg

SEQ ID NO: 39597 - DNA, 33 bp, Homo sapiens
actatactgtactgtaagagaatgcaaggataa

SEQ ID NO: 39598 - DNA, 33 bp, Homo sapiens
gagggcaaaagaacaccactgtttctcagggat

SEQ ID NO: 39599 - DNA, 33 bp, Homo sapiens
gtttctccatgttggccagtttgtttatgacca

SEQ ID NO: 39600 - DNA, 33 bp, Homo sapiens
ttcattagtattattacgagcattatgtcaggt

SEQ ID NO: 39601 - DNA, 33 bp, Homo sapiens
gaatcatcccagttcacgtgtgttttctgtatt

SEQ ID NO: 39602 - DNA, 33 bp, Homo sapiens
agggccgggctggcccaacagcacacatggaga

SEQ ID NO: 39603 - DNA, 33 bp, Homo sapiens
ctgagccaggctctaaatgctttccatggctta

SEQ ID NO: 39604 - DNA, 33 bp, Homo sapiens
aacacacctgtcttcacccagagatggtatctc

SEQ ID NO: 39605 - DNA, 33 bp, Homo sapiens
cccttgcattcgtccaaaagaaggcaggacccc

SEQ ID NO: 39606 - DNA, 33 bp, Homo sapiens
tgacccactgactgacggataaaaatggatttt

SEQ ID NO: 39607 - DNA, 33 bp, Homo sapiens
acacttggccactaagcaggaagtcctggcagg

SEQ ID NO: 39608 - DNA, 33 bp, Homo sapiens
gttccttgttgcaaaccggcaagtacaataatg

SEQ ID NO: 39609 - DNA, 33 bp, Homo sapiens
cttactccttgaaaaagaagtgagtgagcctaa

SEQ ID NO: 39610 - DNA, 33 bp, Homo sapiens
aaccaagattcagttacgacacaataaaataat

SEQ ID NO: 39611 - DNA, 33 bp, Homo sapiens
gatgaacacctcttctcaagaaaggaaggacca

SEQ ID NO: 39612 - DNA, 33 bp, Homo sapiens
tccttttaagtctaaaccaatagaaagcccatt

SEQ ID NO: 39613 - DNA, 33 bp, Homo sapiens
acagataattactaagaacagactgtgccattg

SEQ ID NO: 39614 - DNA, 33 bp, Homo sapiens
tgagaagtaatcatcaagtagcagtgaatcagg

SEQ ID NO: 39615 - DNA, 33 bp, Homo sapiens
ttgttcagagtcaaaacgtaggacctagatctg

SEQ ID NO: 39616 - DNA, 33 bp, Homo sapiens
cacaacaataaaacgacgctgtataaaagtgct

SEQ ID NO: 39617 - DNA, 33 bp, Homo sapiens
tggtgacatcttcatacagttgtaagtggtcaa

SEQ ID NO: 39618 - DNA, 33 bp, Homo sapiens
acttcttaactttccccgctccagtctagtctt

SEQ ID NO: 39619 - DNA, 33 bp, Homo sapiens
cagcaattgcttaataaatgtataacccaaata

SEQ ID NO: 39620 - DNA, 33 bp, Homo sapiens
aagtagctgccaataacgagtacccagccttga

SEQ ID NO: 39621 - DNA, 33 bp, Homo sapiens
acaggcaaataaggaaattatggtgtgggctac

SEQ ID NO: 39622 - DNA, 33 bp, Homo sapiens
tggtttgctggttagcggcagaaatttgcactt

SEQ ID NO: 39623 - DNA, 33 bp, Homo sapiens
gtaataattaacaagcggaataggcaacctaca

SEQ ID NO: 39624 - DNA, 33 bp, Homo sapiens
taaacactactcctccccaagttattaagaatc

SEQ ID NO: 39625 - DNA, 33 bp, Homo sapiens
gacctcagaatgacaaaacatcagtatggttgt

SEQ ID NO: 39626 - DNA, 33 bp, Homo sapiens
agaacacactgaaggagtatagatgaactcatc

SEQ ID NO: 39627 - DNA, 33 bp, Homo sapiens
gcccatgagccaagcaatctcaaattttatacc

SEQ ID NO: 39628 - DNA, 33 bp, Homo sapiens
tcacctatgtgaggacggtagcattgattggga

SEQ ID NO: 39629 - DNA, 33 bp, Homo sapiens
catacagtcaacattcactaactgagtaggtgt

SEQ ID NO: 39630 - DNA, 33 bp, Homo sapiens
aataaaattgggtatacggtacagccccagtag

SEQ ID NO: 39631 - DNA, 33 bp, Homo sapiens
ccggtggtcctaactaaccctgtctccttgcca

SEQ ID NO: 39632 - DNA, 33 bp, Homo sapiens
ggaagtgtcatgtagaatatggctcagctgcag

SEQ ID NO: 39633 - DNA, 33 bp, Homo sapiens
tttccataactgaaaactgaggcaagattatta

SEQ ID NO: 39634 - DNA, 33 bp, Homo sapiens
tgtcgatcttaaacccaaagcatagagaaatgg

SEQ ID NO: 39635 - DNA, 33 bp, Homo sapiens
accagaagcaattttaagtgttatttgcacttt

SEQ ID NO: 39636 - DNA, 33 bp, Homo sapiens
atatggctaagtattacgatgtgaagaaacttg

SEQ ID NO: 39637 - DNA, 33 bp, Homo sapiens
ggtgtagcaatgagtgcagcaatgtgtgtaggt

SEQ ID NO: 39638 - DNA, 33 bp, Homo sapiens
ctttgctaaaagaatgaaactttctgagcaggt

SEQ ID NO: 39639 - DNA, 33 bp, Homo sapiens
gagtttatccatctccactagattttctagttt

SEQ ID NO: 39640 - DNA, 33 bp, Homo sapiens
ctcccctattattgcacgaatagtgtaccagca

SEQ ID NO: 39641 - DNA, 33 bp, Homo sapiens
aataaggagctaaatccaaaatatacaagaaac

SEQ ID NO: 39642 - DNA, 33 bp, Homo sapiens
cagtatgtgttattgacgccaattatcacatct

SEQ ID NO: 39643 - DNA, 33 bp, Homo sapiens
gcatgaacagaatgccacacaggtgaagactgg

SEQ ID NO: 39644 - DNA, 33 bp, Homo sapiens
ttttccatatcaaggccctgctttggcatcgaa

SEQ ID NO: 39645 - DNA, 33 bp, Homo sapiens
ctccaaggtacaattacacatctcccataccac

SEQ ID NO: 39646 - DNA, 33 bp, Homo sapiens
ggcaaaaaatgcagtaataaagcaaatgtgact

SEQ ID NO: 39647 - DNA, 33 bp, Homo sapiens
attccttaggatctacacaaccttggatctgga

SEQ ID NO: 39648 - DNA, 33 bp, Homo sapiens
atccggctgagcaatacgctttcactcccactt

SEQ ID NO: 39649 - DNA, 33 bp, Homo sapiens
ccccagatgtagcaccaccactgttctcctcag

SEQ ID NO: 39650 - DNA, 33 bp, Homo sapiens
taaatccgaggcaatacaggttctcaactccca

SEQ ID NO: 39651 - DNA, 33 bp, Homo sapiens
caccggcctagtgtcacgctccaagagaccaca

SEQ ID NO: 39652 - DNA, 33 bp, Homo sapiens
tgaaatggtcctgaaaattaggtatcatgtttt

SEQ ID NO: 39653 - DNA, 33 bp, Homo sapiens
tatttctattttgtggcccaagacagtggctcc

SEQ ID NO: 39654 - DNA, 33 bp, Homo sapiens
attccaagctaccctcaaaggactaaggcttgc

SEQ ID NO: 39655 - DNA, 33 bp, Homo sapiens
aaatatcctgaaaaccaaaagattataccaata

SEQ ID NO: 39656 - DNA, 33 bp, Homo sapiens
tcctattacctagtcaaattctgaggaaatggg

SEQ ID NO: 39657 - DNA, 33 bp, Homo sapiens
taacggacagaagcccaaaaatggatgaggctc

SEQ ID NO: 39658 - DNA, 33 bp, Homo sapiens
taggcaggaggttagacgagaaacttccaaaaa

SEQ ID NO: 39659 - DNA, 33 bp, Homo sapiens
agtgtgtccgccatcacccaaatctgaatacat

SEQ ID NO: 39660 - DNA, 33 bp, Homo sapiens
cttttaagcatctgaacggtggaagaggctgaa

SEQ ID NO: 39661 - DNA, 33 bp, Homo sapiens
gaccctgatttctaaccacaaaatctcagagga

SEQ ID NO: 39662 - DNA, 33 bp, Homo sapiens
aaagttaattctctatgagtcaggtctccagag

SEQ ID NO: 39663 - DNA, 33 bp, Homo sapiens
ttcgaggagattactcaagttagcagcagaact

SEQ ID NO: 39664 - DNA, 33 bp, Homo sapiens
tcaagtggaccagaaaaaaagtcaaggaggtgc

SEQ ID NO: 39665 - DNA, 33 bp, Homo sapiens
cctgatacagttctccaaatctgctgcaaatac

SEQ ID NO: 39666 - DNA, 33 bp, Homo sapiens
aaggaagagcacacacaatggtaatggttaaac

SEQ ID NO: 39667 - DNA, 33 bp, Homo sapiens
gggtagctgatggcaaatgggaatgaaggtaat

SEQ ID NO: 39668 - DNA, 33 bp, Homo sapiens
ggctttttcagatgtacaatatgctcggtttgg

SEQ ID NO: 39669 - DNA, 33 bp, Homo sapiens
tcttcaccacctgcataaaatagagcttccaac

SEQ ID NO: 39670 - DNA, 33 bp, Homo sapiens
ataaaagagagagaaaaacaacttgcagctttg

SEQ ID NO: 39671 - DNA, 33 bp, Homo sapiens
agtgattgagtattcacctgtaagatagtgaca

SEQ ID NO: 39672 - DNA, 33 bp, Homo sapiens
gtagtagtagttcacacacagtgagtgacacgt

SEQ ID NO: 39673 - DNA, 33 bp, Homo sapiens
tatcctttagttttacacttctcagcctagaat

SEQ ID NO: 39674 - DNA, 33 bp, Homo sapiens
aaaagtgattggacacaaattgaaaaatatctt

SEQ ID NO: 39675 - DNA, 33 bp, Homo sapiens
ctagttttccttgtatcagaaccagactcatgg

SEQ ID NO: 39676 - DNA, 33 bp, Homo sapiens
taagtcaccgtacaccccgaaattcacagcgga

SEQ ID NO: 39677 - DNA, 33 bp, Homo sapiens
catacacagttcatcactgatccaaacgtcgtt

SEQ ID NO: 39678 - DNA, 33 bp, Homo sapiens
cctgtcaatgtctagaaatgatccgaacacata

SEQ ID NO: 39679 - DNA, 33 bp, Homo sapiens
catgtgctaactattcaaaatgtctatgcctgc

SEQ ID NO: 39680 - DNA, 33 bp, Homo sapiens
gagcttaaatgtcccccgatgccaacgattgag

SEQ ID NO: 39681 - DNA, 33 bp, Homo sapiens
ggaagtaatctcaatacgtaagagttataagaa

SEQ ID NO: 39682 - DNA, 33 bp, Homo sapiens
gagagcactgccttgaagttggccgcgtgtgcc

SEQ ID NO: 39683 - DNA, 33 bp, Homo sapiens
tgtgtatgttgaagcactgaactgtgaatctta

SEQ ID NO: 39684 - DNA, 33 bp, Homo sapiens
gtgtttcaaacagagaaaatttagtgaggagaa

SEQ ID NO: 39685 - DNA, 33 bp, Homo sapiens
aagaccctagaacttacgctaacaaatggtaaa

SEQ ID NO: 39686 - DNA, 33 bp, Homo sapiens
aagctgagttacagagcacttcacataccaggc

SEQ ID NO: 39687 - DNA, 33 bp, Homo sapiens
cagagggaatttctcacctttcagacagaagaa

SEQ ID NO: 39688 - DNA, 51 bp, Homo sapiens
gggccacttgaagttagggtgcacaataccaatgcaagctgctatcacaat

SEQ ID NO: 39689 - DNA, 51 bp, Homo sapiens
caaacccttttgcgaactgcgcacacgagggatctaagttgcacgctcctt

SEQ ID NO: 39690 - DNA, 33 bp, Homo sapiens
ggcctggagtgggctccaagtaatacccagcaa

SEQ ID NO: 39691 - DNA, 33 bp, Homo sapiens
cggttacatgatcacaagtctcctgttcatgcc

SEQ ID NO: 39692 - DNA, 33 bp, Homo sapiens
cagaaggtgagagagcagagaaaatatctaata

SEQ ID NO: 39693 - DNA, 33 bp, Homo sapiens
aattcacacataacagaaggggtggcataaact

SEQ ID NO: 39694 - DNA, 33 bp, Homo sapiens
aattcacatagaaaaacgagcaagtaagaattg

SEQ ID NO: 39695 - DNA, 33 bp, Homo sapiens
cactgtgtggtccctcaatgcagtaagaggaaa

SEQ ID NO: 39696 - DNA, 33 bp, Homo sapiens
taatgcgttagcggacaataaagaataacccta

SEQ ID NO: 39697 - DNA, 33 bp, Homo sapiens
actctgcttgtcaagaagatggctctggcctcc

SEQ ID NO: 39698 - DNA, 33 bp, Homo sapiens
cactgcatcctcttcaccccagatccagttgtc

SEQ ID NO: 39699 - DNA, 33 bp, Homo sapiens
ctttccatttgcttaactctctgaggacctccc

SEQ ID NO: 39700 - DNA, 33 bp, Homo sapiens
tgaaagcaagtttcaacaggaggttcatgggag

SEQ ID NO: 39701 - DNA, 33 bp, Homo sapiens
ttgttattagattctcactgtataaatgagtta

SEQ ID NO: 39702 - DNA, 33 bp, Homo sapiens
cagactattacacacaagcgagaaataaacttc

SEQ ID NO: 39703 - DNA, 33 bp, Homo sapiens
gacacagcgttctttacattctaattctagctc

SEQ ID NO: 39704 - DNA, 33 bp, Homo sapiens
aattgctatttcagctcaccttccccaaaactt

SEQ ID NO: 39705 - DNA, 33 bp, Homo sapiens
aggccttaattcctcaacgaaaactgcaaccat

SEQ ID NO: 39706 - DNA, 33 bp, Homo sapiens
agtaccctgtctctcaaattcccatatcaactc

SEQ ID NO: 39707 - DNA, 33 bp, Homo sapiens
gaaacaaaagcttccaccacgactgtaacaggt

SEQ ID NO: 39708 - DNA, 33 bp, Homo sapiens
ggtatgtgccaaaaacggtataaatgaaactat

SEQ ID NO: 39709 - DNA, 33 bp, Homo sapiens
atactcaaactttcctaagaaatttcaactgga

SEQ ID NO: 39710 - DNA, 33 bp, Homo sapiens
ctcactgcctcaggcacgggcacgaagaagaga

SEQ ID NO: 39711 - DNA, 33 bp, Homo sapiens
gcctgccctgtcgtccacatgacaacctgggag

SEQ ID NO: 39712 - DNA, 33 bp, Homo sapiens
cctctttacaaaatgacgaggtttttaccccac

SEQ ID NO: 39713 - DNA, 33 bp, Homo sapiens
cagggaccaggtgtccagagcttcccagcagtc

SEQ ID NO: 39714 - DNA, 33 bp, Homo sapiens
agatcagggaacaaccgagtgactgggcaaagt

SEQ ID NO: 39715 - DNA, 33 bp, Homo sapiens
cttgtgcatggtgagacgacaaggggcaatcaa

SEQ ID NO: 39716 - DNA, 51 bp, Homo sapiens
gaggcaccatcactggggtatcagccatctcatctcaggatcccaccttaa

SEQ ID NO: 39717 - DNA, 33 bp, Homo sapiens
aagctacagagaaccaagtgactctttcatcca

SEQ ID NO: 39718 - DNA, 33 bp, Homo sapiens
gtaggaccctgtctcacgatcttgtgtgtggta

SEQ ID NO: 39719 - DNA, 33 bp, Homo sapiens
ttcctcagaatataaacgctgtacaaggtgtta

SEQ ID NO: 39720 - DNA, 33 bp, Homo sapiens
tgtccagtaccttccacgtatttgttacgcact

SEQ ID NO: 39721 - DNA, 33 bp, Homo sapiens
tcagctcctttatgtccctgtcctagctatctg

SEQ ID NO: 39722 - DNA, 33 bp, Homo sapiens
caaaagttgatacctacccttcatgagactgcc

SEQ ID NO: 39723 - DNA, 33 bp, Homo sapiens
gctctgtggttctgacacttttcacatccactc

SEQ ID NO: 39724 - DNA, 33 bp, Homo sapiens
agcctcaatcacctaaatgaattgtgcagttca

SEQ ID NO: 39725 - DNA, 33 bp, Homo sapiens
tctttcaggttctgagcacactgtggtgagtga

SEQ ID NO: 39726 - DNA, 33 bp, Homo sapiens
agtggctacaggatgaactgggactcaaacaca

SEQ ID NO: 39727 - DNA, 33 bp, Homo sapiens
tggaaaggctgccatgacaaaaataagctggaa

SEQ ID NO: 39728 - DNA, 33 bp, Homo sapiens
tcatttgtctataggacgattggactgtagatg

SEQ ID NO: 39729 - DNA, 33 bp, Homo sapiens
acggcatgcactacaaccagtgggtctcccaca

SEQ ID NO: 39730 - DNA, 33 bp, Homo sapiens
agctggccagcacttacaactcccattacacca

SEQ ID NO: 39731 - DNA, 33 bp, Homo sapiens
taagcaaaaaggaaccagaacctgaagatttgg

SEQ ID NO: 39732 - DNA, 33 bp, Homo sapiens
ttaaggttctagttaaacactgagaaactggcc

SEQ ID NO: 39733 - DNA, 33 bp, Homo sapiens
gttgtttgaatgacagaagagaagcagttcagt

SEQ ID NO: 39734 - DNA, 51 bp, Homo sapiens
tatttccagtgtggaggtcagagagccaaacctttgaggtggaggctcccc

SEQ ID NO: 39735 - DNA, 33 bp, Homo sapiens
cgtatcagggacccaaaggaataactaggacac

SEQ ID NO: 39736 - DNA, 33 bp, Homo sapiens
tggagacctaagctaaccgtccttttctcctcc

SEQ ID NO: 39737 - DNA, 33 bp, Homo sapiens
aagcataatccagccacgattacaataggagag

SEQ ID NO: 39738 - DNA, 33 bp, Homo sapiens
gtggaggaaagagagcaaagtgaccgccagttt

SEQ ID NO: 39739 - DNA, 33 bp, Homo sapiens
tgatctcctagttagcccctcaggtccaggtac

SEQ ID NO: 39740 - DNA, 33 bp, Homo sapiens
gcggactgttcctaatcatacagccagcaggag

SEQ ID NO: 39741 - DNA, 33 bp, Homo sapiens
ccctctgaacgatagcacaagactgtatctttt

SEQ ID NO: 39742 - DNA, 33 bp, Homo sapiens
aatccagaaagatgacaaggaatgggtcacagg

SEQ ID NO: 39743 - DNA, 51 bp, Homo sapiens
ctggattcgagttaaaatcatctccgctgtagttctcctgattaccatcat

SEQ ID NO: 39744 - DNA, 33 bp, Homo sapiens
agctcacaacacctaaaccaggcagtcatgggt

SEQ ID NO: 39745 - DNA, 33 bp, Homo sapiens
ctctggacaataacaacggtggccaatgttcat

SEQ ID NO: 39746 - DNA, 33 bp, Homo sapiens
gccctacagtgtacaacgacttccatattccca

SEQ ID NO: 39747 - DNA, 33 bp, Homo sapiens
tgactcaatgataaggaaacaccctagaatagt

SEQ ID NO: 39748 - DNA, 33 bp, Homo sapiens
gcagcagaatgatgtaccggccagactccacca

SEQ ID NO: 39749 - DNA, 33 bp, Homo sapiens
aaaatgactaaatccactgaggaatcaccaggc

SEQ ID NO: 39750 - DNA, 33 bp, Homo sapiens
tgaaatgagcgcctaacaggatagccacagcct

SEQ ID NO: 39751 - DNA, 33 bp, Homo sapiens
aaacgtgccagaactacgacctggagtgcatga

SEQ ID NO: 39752 - DNA, 33 bp, Homo sapiens
ccagaggtttatttcaaatagtgagtgtcgcta

SEQ ID NO: 39753 - DNA, 33 bp, Homo sapiens
ccgctctgtcaaagataaactaggaaagacgcc

SEQ ID NO: 39754 - DNA, 33 bp, Homo sapiens
acccaaacaagacaagaccagacatttcatttc

SEQ ID NO: 39755 - DNA, 33 bp, Homo sapiens
atcctcaagcagatgaagactcagtcaagaggt

SEQ ID NO: 39756 - DNA, 33 bp, Homo sapiens
tgaggatggggatcataaccagaacaggccaca

SEQ ID NO: 39757 - DNA, 33 bp, Homo sapiens
gtaggaaagctgttgacagtcatggccgtatac

SEQ ID NO: 39758 - DNA, 33 bp, Homo sapiens
atgcttcccctgccaccaggagtctgagcaaat

SEQ ID NO: 39759 - DNA, 51 bp, Homo sapiens
cggcccttaatgtatacctattaacagccaggtacgatgactcacgcctga

SEQ ID NO: 39760 - DNA, 33 bp, Homo sapiens
atgatactgttaccagcagaagagattccagtt

SEQ ID NO: 39761 - DNA, 33 bp, Homo sapiens
gcaagtcccttcccaaaaagcgcaagggacagt

SEQ ID NO: 39762 - DNA, 33 bp, Homo sapiens
gcaataaaacagacaccgagaagtaagatgaaa

SEQ ID NO: 39763 - DNA, 33 bp, Homo sapiens
ttagaagaagcaaggtaaacaaggaatattgct

SEQ ID NO: 39764 - DNA, 33 bp, Homo sapiens
gggtgaatcagcaattcaagtgtgtcttttcta

SEQ ID NO: 39765 - DNA, 33 bp, Homo sapiens
aaggtaaagtccaaacacaggcctggagctcag

SEQ ID NO: 39766 - DNA, 33 bp, Homo sapiens
cctctttttgttgtccccaaacactgatttcca

SEQ ID NO: 39767 - DNA, 33 bp, Homo sapiens
aagtttactctattgggcactattctaggcacg

SEQ ID NO: 39768 - DNA, 51 bp, Homo sapiens
aaacatttatgggctctgctcttaactgtctctttgcctacttggaccctg

SEQ ID NO: 39769 - DNA, 51 bp, Homo sapiens
attgcacaagggactacagaacccacggtgttgtggagaagaatgccactt

SEQ ID NO: 39770 - DNA, 33 bp, Homo sapiens
gcttgttgtggaattacactatgcctgttactc

SEQ ID NO: 39771 - DNA, 33 bp, Homo sapiens
ctcccccattctccatcagctccttttccagct

SEQ ID NO: 39772 - DNA, 33 bp, Homo sapiens
tgtacctcagtctgaacgattaggtttcccttg

SEQ ID NO: 39773 - DNA, 33 bp, Homo sapiens
gctgctatggctgctacaacaacttttcaaaaa

SEQ ID NO: 39774 - DNA, 33 bp, Homo sapiens
agatgttggaactatccgacaaacagtttaaag

SEQ ID NO: 39775 - DNA, 33 bp, Homo sapiens
gttttttgatataagacaagtctactggcaaca

SEQ ID NO: 39776 - DNA, 33 bp, Homo sapiens
actatgagccaaatcaaggatggaattaggaat

SEQ ID NO: 39777 - DNA, 33 bp, Homo sapiens
ctggacttctgagctacagaaaccgcaagataa

SEQ ID NO: 39778 - DNA, 33 bp, Homo sapiens
gaggatatacataggaataggtttgttgggcca

SEQ ID NO: 39779 - DNA, 33 bp, Homo sapiens
ttttgcatttcaatcagcaaagaatgaaagtcc

SEQ ID NO: 39780 - DNA, 33 bp, Homo sapiens
ctttatcatttgcagaagtagtataaagattaa

SEQ ID NO: 39781 - DNA, 51 bp, Homo sapiens
tggttattagcattttcagtaaggacgtatgtttagtaaacagccctcatc

SEQ ID NO: 39782 - DNA, 33 bp, Homo sapiens
taaataaactaagttcaatgcagctaatagagc

SEQ ID NO: 39783 - DNA, 51 bp, Homo sapiens
gctgaattatggctttttcttttccaataggatttacatgtacactcatct

SEQ ID NO: 39784 - DNA, 51 bp, Homo sapiens
tcattgctaggaattatctgcaacaataatgaatatctccttgttctttta

SEQ ID NO: 39785 - DNA, 33 bp, Homo sapiens
aaatgactgagaagtgaaagcgttctgcctatg

SEQ ID NO: 39786 - DNA, 33 bp, Homo sapiens
tgggacccttcatggaccttcttaatgtgcaag

SEQ ID NO: 39787 - DNA, 33 bp, Homo sapiens
gccatgggaagtttcacgcaaagccagtttctc

SEQ ID NO: 39788 - DNA, 33 bp, Homo sapiens
acttgtcagagttcagaaaccactggtagaaat

SEQ ID NO: 39789 - DNA, 33 bp, Homo sapiens
ttctcagctgtaaacccgggtcactccagccat

SEQ ID NO: 39790 - DNA, 33 bp, Homo sapiens
tggaagagtgtgcaaaactttcgagactcctca

SEQ ID NO: 39791 - DNA, 33 bp, Homo sapiens
agtttaagtaattagccgatgtggtttggctct

SEQ ID NO: 39792 - DNA, 51 bp, Homo sapiens
cgttggctgatctttcaacttccaaattctttacaacttccaacattttat

SEQ ID NO: 39793 - DNA, 33 bp, Homo sapiens
catggccccctatgcaggaagtgtctcttaaga

SEQ ID NO: 39794 - DNA, 33 bp, Homo sapiens
aagaaaaagggaagtacggggctatgaagggat

SEQ ID NO: 39795 - DNA, 33 bp, Homo sapiens
ctcctatgtttttctgacacctaattctccttg

SEQ ID NO: 39796 - DNA, 33 bp, Homo sapiens
atacttgatttcttcacagtcccaatacttcct

SEQ ID NO: 39797 - DNA, 33 bp, Homo sapiens
tcacttttcacttagaagaacagagcttttgga

SEQ ID NO: 39798 - DNA, 51 bp, Homo sapiens
tgacacaataatgaagcaacctttccaatacattcaagaagctggaaactg

SEQ ID NO: 39799 - DNA, 51 bp, Homo sapiens
aactgaaaaggctaccttttataaactctcaaaactggctaggtaggaatc

SEQ ID NO: 39800 - DNA, 51 bp, Homo sapiens
aaagaattaaatttatatattgaagaaacctacggtgtaccttgaaaattt

SEQ ID NO: 39801 - DNA, 33 bp, Homo sapiens
cactctagcctggtacaaacacctgagaaaggc

SEQ ID NO: 39802 - DNA, 33 bp, Homo sapiens
gctagagtgttgtcacaagaatgtctgtcttgc

SEQ ID NO: 39803 - DNA, 33 bp, Homo sapiens
tgagccgaagctcgagaataggagcacaccaaa

SEQ ID NO: 39804 - DNA, 33 bp, Homo sapiens
actaaagcattccatgaattaagaagctagtcc

SEQ ID NO: 39805 - DNA, 51 bp, Homo sapiens
tgggagaattctcagtgtttattaactgctggtgatcctctcttctaggat

SEQ ID NO: 39806 - DNA, 33 bp, Homo sapiens
tacatcccagcattataaaaagtctcaacccat

SEQ ID NO: 39807 - DNA, 33 bp, Homo sapiens
ggctgaatttagcacacaggctgaagttggcca

SEQ ID NO: 39808 - DNA, 33 bp, Homo sapiens
atccaagccattatgaaaatccaaaaggaattg

SEQ ID NO: 39809 - DNA, 33 bp, Homo sapiens
ggtttggctagagtaaatgaaaggatggaggtg

SEQ ID NO: 39810 - DNA, 33 bp, Homo sapiens
gccagaaagatttgggcatatgttagtagctag

SEQ ID NO: 39811 - DNA, 51 bp, Homo sapiens
ttaaggacctttctgatgttccttcacttactgattgagagaaaaacaaag

SEQ ID NO: 39812 - DNA, 33 bp, Homo sapiens
gaaactgatgtagtaactgttatttgatatgtt

SEQ ID NO: 39813 - DNA, 33 bp, Homo sapiens
attaagatattagcagaattatgtgttcaaacc

SEQ ID NO: 39814 - DNA, 33 bp, Homo sapiens
atgggagttgagtcaagctagtcagtagttgag

SEQ ID NO: 39815 - DNA, 33 bp, Homo sapiens
caacctaggctaccaaatcgtaaagacgttctt

SEQ ID NO: 39816 - DNA, 33 bp, Homo sapiens
tgcagggatataaacacctagccctcttcccct

SEQ ID NO: 39817 - DNA, 33 bp, Homo sapiens
tctaggaataatcagacgggtagcaatgtctgg

SEQ ID NO: 39818 - DNA, 33 bp, Homo sapiens
gtattgtattatactactactatggtctggata

SEQ ID NO: 39819 - DNA, 33 bp, Homo sapiens
agtcgctgtgtttttccagaactctcaactcca

SEQ ID NO: 39820 - DNA, 33 bp, Homo sapiens
tgttgtaggttgtgggaaatttaatgacattca

SEQ ID NO: 39821 - DNA, 33 bp, Homo sapiens
ccaggcatcctgaacaccaaaggattatgagga

SEQ ID NO: 39822 - DNA, 33 bp, Homo sapiens
agatagcttaggatgaagaaaccacagtgtcct

SEQ ID NO: 39823 - DNA, 33 bp, Homo sapiens
tctttgcttcttccgacggctagctctgttact

SEQ ID NO: 39824 - DNA, 51 bp, Homo sapiens
caactatgctacacagaagtttagaaatgaaggagataattgttccatgag

SEQ ID NO: 39825 - DNA, 33 bp, Homo sapiens
aggtgtggccttgggaaaacttaagagacaaag

SEQ ID NO: 39826 - DNA, 33 bp, Homo sapiens
atatttccaaataagaacaccttctgacatgag

SEQ ID NO: 39827 - DNA, 51 bp, Homo sapiens
accctaggagcctattttctttgtacactatgttataatttatttgaagac

SEQ ID NO: 39828 - DNA, 33 bp, Homo sapiens
acatacagaaagaaaaaagttcattgtggcctt

SEQ ID NO: 39829 - DNA, 33 bp, Homo sapiens
cagggccaagagaaaaagtagtcagagtgaggg

SEQ ID NO: 39830 - DNA, 33 bp, Homo sapiens
tgccaccagattccctcactcttcagcttgcag

SEQ ID NO: 39831 - DNA, 33 bp, Homo sapiens
tgcttccttcactaccaacaagttttatgagaa

SEQ ID NO: 39832 - DNA, 33 bp, Homo sapiens
ggtagaatagcaagaagtgggtctttttctctt

SEQ ID NO: 39833 - DNA, 33 bp, Homo sapiens
attggttccaagacaccgcctacctacatcaca

SEQ ID NO: 39834 - DNA, 33 bp, Homo sapiens
gtttacaaagatgttaagtaagattctggagag

SEQ ID NO: 39835 - DNA, 33 bp, Homo sapiens
tcttaaaggcttactgaattttgttagaacaaa

SEQ ID NO: 39836 - DNA, 33 bp, Homo sapiens
aaaaaaaacagtgagaaaacagtggtaggtgtg

SEQ ID NO: 39837 - DNA, 33 bp, Homo sapiens
atcagtgactttgatgcaagtagcttcaataaa

SEQ ID NO: 39838 - DNA, 33 bp, Homo sapiens
cttaattgggctgaaaaaaatacagggctggaa

SEQ ID NO: 39839 - DNA, 33 bp, Homo sapiens
ctagtatatttgagcactgaaattatttcctgg

SEQ ID NO: 39840 - DNA, 33 bp, Homo sapiens
gtaacttaatttattgaaaaagatcctgatgta

SEQ ID NO: 39841 - DNA, 33 bp, Homo sapiens
cacagatcaaaacttcactgcaaacatgaaaac

SEQ ID NO: 39842 - DNA, 33 bp, Homo sapiens
tcagggaaagctattcaaaagcaggccaagtca

SEQ ID NO: 39843 - DNA, 33 bp, Homo sapiens
gagttgaagagttaagcccctactcaccatcat

SEQ ID NO: 39844 - DNA, 33 bp, Homo sapiens
agtctagggtgagaaaccagttagtgatcatgc

SEQ ID NO: 39845 - DNA, 33 bp, Homo sapiens
acttccttcactgatacgccttttcaattgtct

SEQ ID NO: 39846 - DNA, 33 bp, Homo sapiens
gtgttcaccagaaaaactgtctacattctagat

SEQ ID NO: 39847 - DNA, 33 bp, Homo sapiens
cggaacctagttgtgacatagaagtgttagcct

SEQ ID NO: 39848 - DNA, 33 bp, Homo sapiens
tacaaaggagaaaacacggagctgggaacaata

SEQ ID NO: 39849 - DNA, 33 bp, Homo sapiens
tctagtgagctagcaaagcgagttaaacagaca

SEQ ID NO: 39850 - DNA, 33 bp, Homo sapiens
gtgtgcatacagagaaatatgattattagggac

SEQ ID NO: 39851 - DNA, 33 bp, Homo sapiens
tgttagcattcctttcgaagtccaaacaaaata

SEQ ID NO: 39852 - DNA, 33 bp, Homo sapiens
tttgctttttcctttcaattttaacacatagag

SEQ ID NO: 39853 - DNA, 33 bp, Homo sapiens
catcaactcaccaggagagtgagcactaagaac

SEQ ID NO: 39854 - DNA, 33 bp, Homo sapiens
ggggccctcgcttaccaacagttcctctccatg

SEQ ID NO: 39855 - DNA, 33 bp, Homo sapiens
ttggtattgcagagtaaattgaagccagtataa

SEQ ID NO: 39856 - DNA, 33 bp, Homo sapiens
aacataggccaattccaaatcttgggggagatg

SEQ ID NO: 39857 - DNA, 51 bp, Homo sapiens
tctatttttaatctgaggaaccttcataatgctttctgtagtagctgcacc

SEQ ID NO: 39858 - DNA, 33 bp, Homo sapiens
cagtgaatgagggagagaggttcctgatgtgaa

SEQ ID NO: 39859 - DNA, 33 bp, Homo sapiens
acattttctttaggtcaccatttattgatggac

SEQ ID NO: 39860 - DNA, 33 bp, Homo sapiens
tccttttttaatatccagcatctgacttattag

SEQ ID NO: 39861 - DNA, 33 bp, Homo sapiens
aaaaaaaaaggcatagacattttgcaaagcatt

SEQ ID NO: 39862 - DNA, 33 bp, Homo sapiens
ttaacaagcttagaaacctcctaagtgcagggc

SEQ ID NO: 39863 - DNA, 33 bp, Homo sapiens
gcatagcaatattatcacctatccttccaattc

SEQ ID NO: 39864 - DNA, 33 bp, Homo sapiens
tgttatgagatgggaacgatacacagcctctcc

SEQ ID NO: 39865 - DNA, 33 bp, Homo sapiens
gtaaagtttggagttacacaacactttggtaac

SEQ ID NO: 39866 - DNA, 33 bp, Homo sapiens
cactgaatacacataaacaacagagagcaatgt

SEQ ID NO: 39867 - DNA, 33 bp, Homo sapiens
tcatatggtttgccccagaaggaaaaacttgtg

SEQ ID NO: 39868 - DNA, 51 bp, Homo sapiens
atggaaaaatgtcttcctaatctgaaaaatctttttatcatcattcaggca

SEQ ID NO: 39869 - DNA, 33 bp, Homo sapiens
tattttaatacaggtcgcatttgaattagataa

SEQ ID NO: 39870 - DNA, 33 bp, Homo sapiens
ctctctccttaatccaccataccagaaacctat

SEQ ID NO: 39871 - DNA, 33 bp, Homo sapiens
tcatcccagcaaagaagcagtttgttaactcct

SEQ ID NO: 39872 - DNA, 33 bp, Homo sapiens
gtgtccttgagtttcacgtaaccaaacaccttt

SEQ ID NO: 39873 - DNA, 51 bp, Homo sapiens
caataataagtaaacagaaacaatacgtgcaactccaagtctcttaagact

SEQ ID NO: 39874 - DNA, 33 bp, Homo sapiens
gccaatgttaacctcaactgatgaagccatgtg

SEQ ID NO: 39875 - DNA, 33 bp, Homo sapiens
gtatctgttccaatcaactaataggaaggtgct

SEQ ID NO: 39876 - DNA, 33 bp, Homo sapiens
gtcttacattgattgaaagatctgttatacata

SEQ ID NO: 39877 - DNA, 33 bp, Homo sapiens
ctgcaaagattgctacaatttactcataaagtc

SEQ ID NO: 39878 - DNA, 33 bp, Homo sapiens
aacttatggtctcacaaaaaatctgatcaaggt

SEQ ID NO: 39879 - DNA, 33 bp, Homo sapiens
ctcttcctgtgtcttcacctatttctgttaggg

SEQ ID NO: 39880 - DNA, 33 bp, Homo sapiens
tattctgtcaggataccgtaagctccataaaga

SEQ ID NO: 39881 - DNA, 33 bp, Homo sapiens
acttgagcacctggataagcaacctgattcatc

SEQ ID NO: 39882 - DNA, 33 bp, Homo sapiens
ttcccttaagattgaaacctggattagttctcc

SEQ ID NO: 39883 - DNA, 33 bp, Homo sapiens
aataagggctttagaaacagacaagtcggaatg

SEQ ID NO: 39884 - DNA, 33 bp, Homo sapiens
tctcctaattgtttcacgccaagaaagaaccat

SEQ ID NO: 39885 - DNA, 33 bp, Homo sapiens
gcaaaggatcactccactgaatttgtattactt

SEQ ID NO: 39886 - DNA, 33 bp, Homo sapiens
aatatttgctcctttacatgaacatataattta

SEQ ID NO: 39887 - DNA, 33 bp, Homo sapiens
aaacatgggctagaataaaagtctttaaaacac

SEQ ID NO: 39888 - DNA, 33 bp, Homo sapiens
gcctggaatgatagtaactttattgctgatttg

SEQ ID NO: 39889 - DNA, 33 bp, Homo sapiens
gacacagaaattaacaacatttttcctgcctga

SEQ ID NO: 39890 - DNA, 33 bp, Homo sapiens
tctaagaatttgtggaaatcaaaagaggatttg

SEQ ID NO: 39891 - DNA, 33 bp, Homo sapiens
gacaggcagagtactgcaaaggagttaagccaa

SEQ ID NO: 39892 - DNA, 33 bp, Homo sapiens
tcagccaagttaactacctgccaaagcaaagca

SEQ ID NO: 39893 - DNA, 33 bp, Homo sapiens
aaagcacacttaagccaaaagctctggtttgtt

SEQ ID NO: 39894 - DNA, 33 bp, Homo sapiens
aagggcccagtcctagaagaattcaacacctgc

SEQ ID NO: 39895 - DNA, 33 bp, Homo sapiens
aacataagaattacagaagattctcagtgtaaa

SEQ ID NO: 39896 - DNA, 33 bp, Homo sapiens
taccaaaagaggatacaattgtcacaaaacaat

SEQ ID NO: 39897 - DNA, 33 bp, Homo sapiens
cgggcacatttcttacacgttcgctgagaagcc

SEQ ID NO: 39898 - DNA, 33 bp, Homo sapiens
attaattcactgttaaagctactgctctattca

SEQ ID NO: 39899 - DNA, 33 bp, Homo sapiens
tgaagagtaacaaaagacttagaaaatgattcc

SEQ ID NO: 39900 - DNA, 33 bp, Homo sapiens
cgtattttagtattcaatctattcatgcagcta

SEQ ID NO: 39901 - DNA, 33 bp, Homo sapiens
gccaggcttatctctccacctcaaatgatccgc

SEQ ID NO: 39902 - DNA, 33 bp, Homo sapiens
gaatgtgaatgccaaactacggaagcaacctaa

SEQ ID NO: 39903 - DNA, 33 bp, Homo sapiens
ctccaaatttagcccacgcacagagtcagggga

SEQ ID NO: 39904 - DNA, 33 bp, Homo sapiens
gattggagagagaggaaaagcattcttaggttg

SEQ ID NO: 39905 - DNA, 51 bp, Homo sapiens
aatcactacagttctcagatttacaccttttttttgtcattggcttgatgt

SEQ ID NO: 39906 - DNA, 33 bp, Homo sapiens
aaaaacaactgagtagaatgccacttaaaagcg

SEQ ID NO: 39907 - DNA, 33 bp, Homo sapiens
ttgattagtgacccagaaaaccaattctgaaat

SEQ ID NO: 39908 - DNA, 33 bp, Homo sapiens
caagaagctcacaatgaagtgtatataaaagga

SEQ ID NO: 39909 - DNA, 33 bp, Homo sapiens
gcctccaggtcttaaactgatgctagctggagt

SEQ ID NO: 39910 - DNA, 33 bp, Homo sapiens
gaaaggcttgacacccaccttgtgatcacggtc

SEQ ID NO: 39911 - DNA, 33 bp, Homo sapiens
acttatcaattgttccagcaagtggtgattact

SEQ ID NO: 39912 - DNA, 51 bp, Homo sapiens
cagatttataaaaggtattcaaaggccacataatgtttggttgagttaggt

SEQ ID NO: 39913 - DNA, 33 bp, Homo sapiens
tacatcactggcctaagctacaaaaccctgaat

SEQ ID NO: 39914 - DNA, 33 bp, Homo sapiens
tctctttaatatgacccgaaaaataacttccag

SEQ ID NO: 39915 - DNA, 33 bp, Homo sapiens
gctgggaagtgctaagcccagaaatcgagtttt

SEQ ID NO: 39916 - DNA, 33 bp, Homo sapiens
ctgattggtactatgacgtttaaagatttcctt

SEQ ID NO: 39917 - DNA, 33 bp, Homo sapiens
taactaaagcctagaacgatttcaggagctgcc

SEQ ID NO: 39918 - DNA, 33 bp, Homo sapiens
taaaacactctttgtacgcagcaaggaaagaat

SEQ ID NO: 39919 - DNA, 33 bp, Homo sapiens
tatactccattcatgacacatgatacaaatgca

SEQ ID NO: 39920 - DNA, 33 bp, Homo sapiens
agaaatgaaaggcaacagtgaacagtgtttgct

SEQ ID NO: 39921 - DNA, 33 bp, Homo sapiens
gtactgtaaatgtccacctgattttatttatga

SEQ ID NO: 39922 - DNA, 33 bp, Homo sapiens
ttcacagtatcagaaccactcatcacccaaccc

SEQ ID NO: 39923 - DNA, 51 bp, Homo sapiens
tgtggctagtagctactgtatcaaacagtgtagagaacattttcatcaaca

SEQ ID NO: 39924 - DNA, 33 bp, Homo sapiens
atcaagaagaaacacccgaattgcaacctgttg

SEQ ID NO: 39925 - DNA, 33 bp, Homo sapiens
ctgtattctcaccttccctgggcttatccatat

SEQ ID NO: 39926 - DNA, 33 bp, Homo sapiens
gagtgacattaggagaaaaagtgacttgcttgt

SEQ ID NO: 39927 - DNA, 33 bp, Homo sapiens
taggaacaatggattaggtttcattctgattct

SEQ ID NO: 39928 - DNA, 33 bp, Homo sapiens
attatataatgctcaagaggtcaattcagtgaa

SEQ ID NO: 39929 - DNA, 33 bp, Homo sapiens
tttttctttgagtggcataggaattatgatatt

SEQ ID NO: 39930 - DNA, 33 bp, Homo sapiens
tctagaagttaaaaacaaattagcgatctttac

SEQ ID NO: 39931 - DNA, 33 bp, Homo sapiens
gaatcaaattataaacaaagcacagaaaatgat

SEQ ID NO: 39932 - DNA, 51 bp, Homo sapiens
attaaaaaagaaaataattaacggacgatagtgtttatcaacctactgtga

SEQ ID NO: 39933 - DNA, 33 bp, Homo sapiens
attattgccccagacccggcctggaatgaatac

SEQ ID NO: 39934 - DNA, 33 bp, Homo sapiens
tgtgtattcttctccacacttggtacaaaattg

SEQ ID NO: 39935 - DNA, 33 bp, Homo sapiens
gtcatttgcatgattacagaaagaaaaagtcac

SEQ ID NO: 39936 - DNA, 33 bp, Homo sapiens
actccttctttctgaacaagtgtgtgtcctatg

SEQ ID NO: 39937 - DNA, 33 bp, Homo sapiens
agactcatttcttgaccaaacctattctttgtc

SEQ ID NO: 39938 - DNA, 51 bp, Homo sapiens
tagaatatacattattttcatctacaaatggaacaatctgtaagattgacc

SEQ ID NO: 39939 - DNA, 33 bp, Homo sapiens
gtggtagaatgcatgactaccagatatactgag

SEQ ID NO: 39940 - DNA, 33 bp, Homo sapiens
aaaaagtcaaactattcaaacagcaatattcaa

SEQ ID NO: 39941 - DNA, 33 bp, Homo sapiens
tccatattctgattccaatcatactacataact

SEQ ID NO: 39942 - DNA, 33 bp, Homo sapiens
gtatttggggcaaaagcctagatatctaaaaac

SEQ ID NO: 39943 - DNA, 33 bp, Homo sapiens
tatcctatttgatggcccaatctcatgttactg

SEQ ID NO: 39944 - DNA, 33 bp, Homo sapiens
ctttggacctcatgtacgctataggcttccctg

SEQ ID NO: 39945 - DNA, 33 bp, Homo sapiens
gcaaatatattgttcccgaaaacttcattagtt

SEQ ID NO: 39946 - DNA, 33 bp, Homo sapiens
tctccctcacgttccaatatcaaattccttgta

SEQ ID NO: 39947 - DNA, 33 bp, Homo sapiens
ttccattactttgacacgatcaggcattccccg

SEQ ID NO: 39948 - DNA, 33 bp, Homo sapiens
cttgtctgggtctacagatgttggtaaaagctg

SEQ ID NO: 39949 - DNA, 33 bp, Homo sapiens
caccataagttaggaggcacgtgcaaagaggat

SEQ ID NO: 39950 - DNA, 33 bp, Homo sapiens
agagataggacccctcaagatcattatccctcc

SEQ ID NO: 39951 - DNA, 33 bp, Homo sapiens
gtggatccacattttaaaagttgggaagaagat

SEQ ID NO: 39952 - DNA, 33 bp, Homo sapiens
cacctccacctgaactaacaatgtctgctctat

SEQ ID NO: 39953 - DNA, 51 bp, Homo sapiens
tttctactgagaaattaaatgtaaaattaaaggattatccctttccaaaaa

SEQ ID NO: 39954 - DNA, 33 bp, Homo sapiens
gcagctttcttggaaacagttcaggcccagtct

SEQ ID NO: 39955 - DNA, 33 bp, Homo sapiens
tgatcacaagaccttaaaaactatgtgagaaaa

SEQ ID NO: 39956 - DNA, 51 bp, Homo sapiens
agtgcagtggtgggattataattcacggtagctttaaattcctgggctcaa

SEQ ID NO: 39957 - DNA, 33 bp, Homo sapiens
tctggagcggactgaaagaaaagatagattggg

SEQ ID NO: 39958 - DNA, 33 bp, Homo sapiens
tgtaatttggtcatcaccagaagactgtgacat

SEQ ID NO: 39959 - DNA, 33 bp, Homo sapiens
agctctttcacacagactatgtaatttggtcat

SEQ ID NO: 39960 - DNA, 33 bp, Homo sapiens
aggaatacaaacatcacaatgcgagggagaaaa

SEQ ID NO: 39961 - DNA, 33 bp, Homo sapiens
ataaactctgtttcaccgaagataggaaaaaag

SEQ ID NO: 39962 - DNA, 33 bp, Homo sapiens
tctaacattgctataacaaaacgaggaggactg

SEQ ID NO: 39963 - DNA, 33 bp, Homo sapiens
cactactgaagcaaaaccttcctaagtactttg

SEQ ID NO: 39964 - DNA, 33 bp, Homo sapiens
gtgcctaaacatcataagagtaagacctgaaaa

SEQ ID NO: 39965 - DNA, 33 bp, Homo sapiens
gctttgttccatgcaactgagttacttgaaaca

SEQ ID NO: 39966 - DNA, 33 bp, Homo sapiens
agcgacatataagatcccattttgaaacaccta

SEQ ID NO: 39967 - DNA, 33 bp, Homo sapiens
acttaattttggaatacgccggctttcgacaaa

SEQ ID NO: 39968 - DNA, 33 bp, Homo sapiens
ctccaagaaatagcacaagagggtgatgatggc

SEQ ID NO: 39969 - DNA, 33 bp, Homo sapiens
gaagccatggacagtgccaactttcccagcaat

SEQ ID NO: 39970 - DNA, 33 bp, Homo sapiens
ggtagagtaacatctacaccacatctactttct

SEQ ID NO: 39971 - DNA, 33 bp, Homo sapiens
caattcagtccatgtacctgttaaaaacagctt

SEQ ID NO: 39972 - DNA, 33 bp, Homo sapiens
tcaacaaggaaagtgccgagatagaaggccaga

SEQ ID NO: 39973 - DNA, 33 bp, Homo sapiens
tccctcaggcataatgcaatgatgtggctaggt

SEQ ID NO: 39974 - DNA, 33 bp, Homo sapiens
attatggcttttaagtcaaccaaagatattttc

SEQ ID NO: 39975 - DNA, 33 bp, Homo sapiens
tgtgttttctaggaagccatttactcattataa

SEQ ID NO: 39976 - DNA, 33 bp, Homo sapiens
acataaggtaaaaaaaggtcaatcttgaagtca

SEQ ID NO: 39977 - DNA, 33 bp, Homo sapiens
ttcaattcttagtaaaagctccattgtagtcag

SEQ ID NO: 39978 - DNA, 33 bp, Homo sapiens
cattttgttcaacagacataaaagaagatggca

SEQ ID NO: 39979 - DNA, 33 bp, Homo sapiens
tgagtttcttgccaaaatgaaattggatgctaa

SEQ ID NO: 39980 - DNA, 33 bp, Homo sapiens
gaggatgagatgccagaatgtctatgcatggtg

SEQ ID NO: 39981 - DNA, 33 bp, Homo sapiens
aagttaaacttggaaactgaatcacatacaaaa

SEQ ID NO: 39982 - DNA, 33 bp, Homo sapiens
gagaaagaagtttaagcataaggctgcctcaag

SEQ ID NO: 39983 - DNA, 33 bp, Homo sapiens
ctgaattccagtaaaacagataatgccaaccat

SEQ ID NO: 39984 - DNA, 33 bp, Homo sapiens
tcttgacaatattgggccatcttatgcatggac

SEQ ID NO: 39985 - DNA, 33 bp, Homo sapiens
gccctgtaaaaataaccaattcctccaactgtg

SEQ ID NO: 39986 - DNA, 33 bp, Homo sapiens
ccgttctatagcggtaagttccttccttgttct

SEQ ID NO: 39987 - DNA, 33 bp, Homo sapiens
tatccttatgtgggcacagtgcaaggcgttact

SEQ ID NO: 39988 - DNA, 33 bp, Homo sapiens
gatttgccccatataacatgccaaaaaatgaga

SEQ ID NO: 39989 - DNA, 33 bp, Homo sapiens
agataccatcttacaaccatcgaaatggctatt

SEQ ID NO: 39990 - DNA, 33 bp, Homo sapiens
caattttggatctctacggcatactgaaggctt

SEQ ID NO: 39991 - DNA, 33 bp, Homo sapiens
agcagccagtgacatacaacgatgtggtagatt

SEQ ID NO: 39992 - DNA, 33 bp, Homo sapiens
gggagtggtaagaagaagtcaaattcaagatct

SEQ ID NO: 39993 - DNA, 33 bp, Homo sapiens
aacatttcacacacaaaagttcagaatcctggg

SEQ ID NO: 39994 - DNA, 33 bp, Homo sapiens
gtaatgcacattaatacctctttccctttaata

SEQ ID NO: 39995 - DNA, 33 bp, Homo sapiens
gaacacaactttcaacactattccaatgggcaa

SEQ ID NO: 39996 - DNA, 33 bp, Homo sapiens
aagtacagttctgttacagcgtactagttgggc

SEQ ID NO: 39997 - DNA, 33 bp, Homo sapiens
ctcaagctgtttctcaaagtagcctgataattt

SEQ ID NO: 39998 - DNA, 33 bp, Homo sapiens
tgcagtactggaataacaacagataagtacata

SEQ ID NO: 39999 - DNA, 33 bp, Homo sapiens
aggacatccaaaaattaaagtgattatgcttct

SEQ ID NO: 40000 - DNA, 33 bp, Homo sapiens
acttacccatacaaatcacgatgcaaaccagca

SEQ ID NO: 40001 - DNA, 33 bp, Homo sapiens
aggcaaactacgttcacgttcttcataaagctg

SEQ ID NO: 40002 - DNA, 33 bp, Homo sapiens
agtgatttgtctaataaatccgggcaaagtaaa

SEQ ID NO: 40003 - DNA, 33 bp, Homo sapiens
tgtagggctttgtagacacactaaggacatttt

SEQ ID NO: 40004 - DNA, 33 bp, Homo sapiens
tcaatggaagtgtatacagagagaagtggacag

SEQ ID NO: 40005 - DNA, 33 bp, Homo sapiens
caggcagtatctagtaccaagcacattgctttc

SEQ ID NO: 40006 - DNA, 33 bp, Homo sapiens
ccttgagcttaacctccgagaatctgccaaaaa

SEQ ID NO: 40007 - DNA, 33 bp, Homo sapiens
ataacattgtagggcaatacattactcatgtgt

SEQ ID NO: 40008 - DNA, 33 bp, Homo sapiens
cagagaggaagctggcaatctctgtcaattctg

SEQ ID NO: 40009 - DNA, 33 bp, Homo sapiens
gagtgatactttgaggacatgtgactaaccccg

SEQ ID NO: 40010 - DNA, 33 bp, Homo sapiens
agccactctttcttcaacccatggagacatctt

SEQ ID NO: 40011 - DNA, 33 bp, Homo sapiens
tctagatggtgcttagccctggagtgggaaggg

SEQ ID NO: 40012 - DNA, 33 bp, Homo sapiens
gaacgactggtttagacgcttggtcactatacc

SEQ ID NO: 40013 - DNA, 33 bp, Homo sapiens
cccaagtttgaagttacggtcaatgcaccacaa

SEQ ID NO: 40014 - DNA, 33 bp, Homo sapiens
cacattttcttcattcaatctatcattgatgga

SEQ ID NO: 40015 - DNA, 33 bp, Homo sapiens
caggctgttagggaatcacagtaataagagtaa

SEQ ID NO: 40016 - DNA, 33 bp, Homo sapiens
tctgcctgaatcaaaccacaaaaatagccagat

SEQ ID NO: 40017 - DNA, 51 bp, Homo sapiens
tgcccagaggtcaagtcttctgcacacgcttcagcctcacctcttgcagct

SEQ ID NO: 40018 - DNA, 33 bp, Homo sapiens
agacattaaatcctaacggacactaagccctcc

SEQ ID NO: 40019 - DNA, 33 bp, Homo sapiens
tgagaggctcctgataataacttttaatgattt

SEQ ID NO: 40020 - DNA, 33 bp, Homo sapiens
gacgtggatttgagaaacatcagcacgcaagga

SEQ ID NO: 40021 - DNA, 33 bp, Homo sapiens
agtggcccttccttcccgattcctacactcctc

SEQ ID NO: 40022 - DNA, 33 bp, Homo sapiens
cactctagcggccctaaacaaagttcttacctg

SEQ ID NO: 40023 - DNA, 33 bp, Homo sapiens
ctcaccccacacctaacgaatccgaatctgccc

SEQ ID NO: 40024 - DNA, 33 bp, Homo sapiens
atgatgctcattattcaagtattcagacataac

SEQ ID NO: 40025 - DNA, 33 bp, Homo sapiens
tttaccctaatgctcacggcagtggccagtttt

SEQ ID NO: 40026 - DNA, 51 bp, Homo sapiens
gaagaacttgggaagttgtgggtgacgaatacttgggttctatagaagaaa

SEQ ID NO: 40027 - DNA, 33 bp, Homo sapiens
taatttaattccatgcaactaaagataatgtta

SEQ ID NO: 40028 - DNA, 33 bp, Homo sapiens
aaacttcatcgtaatgcatccagtctctttttc

SEQ ID NO: 40029 - DNA, 33 bp, Homo sapiens
taaaatgactgtaagactactagaaatgtgaga

SEQ ID NO: 40030 - DNA, 33 bp, Homo sapiens
acatatttgccttaaccagacctcctcctgcag

SEQ ID NO: 40031 - DNA, 33 bp, Homo sapiens
tctctttttaggcttacggaatgactttaaagt

SEQ ID NO: 40032 - DNA, 33 bp, Homo sapiens
tgtatggtataagtgaaccatcattcattttat

SEQ ID NO: 40033 - DNA, 33 bp, Homo sapiens
caactgtcccctggaccatttccccagagacca

SEQ ID NO: 40034 - DNA, 33 bp, Homo sapiens
gtgataacatgagctacggtagtgttataataa

SEQ ID NO: 40035 - DNA, 33 bp, Homo sapiens
aaaagaagtctgtttcaaaaactcaggcaggcc

SEQ ID NO: 40036 - DNA, 33 bp, Homo sapiens
ttcttcaggaaattgaccagagtcatcaaaata

SEQ ID NO: 40037 - DNA, 33 bp, Homo sapiens
gacagtactttcaaatcatcatgagttttgttt

SEQ ID NO: 40038 - DNA, 33 bp, Homo sapiens
tttatccttcatttgcactcatgctctttgttt

SEQ ID NO: 40039 - DNA, 33 bp, Homo sapiens
agtctgggacccccgcagaagacagtgccttcc

SEQ ID NO: 40040 - DNA, 33 bp, Homo sapiens
aagactacatttgggaaaaagggagccaaagca

SEQ ID NO: 40041 - DNA, 33 bp, Homo sapiens
cattcagatgagaacacattttgcaaggaaaaa

SEQ ID NO: 40042 - DNA, 33 bp, Homo sapiens
accctttgcccttttacaatttggcttttatgt

SEQ ID NO: 40043 - DNA, 33 bp, Homo sapiens
aaaatggggatctatcaaaaaatggtaattatg

SEQ ID NO: 40044 - DNA, 33 bp, Homo sapiens
atcagtgtgcaaaaacaacagtcattcctatac

SEQ ID NO: 40045 - DNA, 33 bp, Homo sapiens
gcatgacaaatttgccaatgtctaaattacagt

SEQ ID NO: 40046 - DNA, 33 bp, Homo sapiens
tgaatgaattctggtacaaaaagaacattagtg

SEQ ID NO: 40047 - DNA, 33 bp, Homo sapiens
ctctagactttccctaccagttctccatatttc

SEQ ID NO: 40048 - DNA, 33 bp, Homo sapiens
ggctttctcaatttgacatgaattctgtgagaa

SEQ ID NO: 40049 - DNA, 33 bp, Homo sapiens
ccagaatgtccaaatacacagttttgataggcc

SEQ ID NO: 40050 - DNA, 33 bp, Homo sapiens
agtaatgaaaagaaaacggataactcattgagt

SEQ ID NO: 40051 - DNA, 33 bp, Homo sapiens
caaggcaccaatcacggatgcattggcaatcag

SEQ ID NO: 40052 - DNA, 51 bp, Homo sapiens
tgctcaatactaaactcttccaaacagttggatctatcactggaattctga

SEQ ID NO: 40053 - DNA, 33 bp, Homo sapiens
ccaagtgttcaccatacagtcagtaattgattc

SEQ ID NO: 40054 - DNA, 33 bp, Homo sapiens
cagttgttcagtgtttaaaaagttttgaaccgt

SEQ ID NO: 40055 - DNA, 33 bp, Homo sapiens
tactgcctcaaaagcacatcatgacaagatacc

SEQ ID NO: 40056 - DNA, 33 bp, Homo sapiens
tggtcactctagtcaacaattttgcatctgacg

SEQ ID NO: 40057 - DNA, 33 bp, Homo sapiens
gatgctcttgtagtacaaatggtgtatcctagt

SEQ ID NO: 40058 - DNA, 33 bp, Homo sapiens
tcagaaaatagagcaaaaaaaagtagcataatg

SEQ ID NO: 40059 - DNA, 33 bp, Homo sapiens
gatgaagtaggcagtgcagtttttgccctacca

SEQ ID NO: 40060 - DNA, 33 bp, Homo sapiens
ttacatttacatttaccactaattccctgagct

SEQ ID NO: 40061 - DNA, 33 bp, Homo sapiens
cccatggatcaggtcccagattctcttatctgt

SEQ ID NO: 40062 - DNA, 33 bp, Homo sapiens
agaaatctcaacaggaagcctctaaataatctt

SEQ ID NO: 40063 - DNA, 51 bp, Homo sapiens
gatgttttgtttttctctataggcaactcataagttacaatgccaaagtct

SEQ ID NO: 40064 - DNA, 51 bp, Homo sapiens
gttactttttgattcagataaaacacgcttgggaaaaagtacctggaggca

SEQ ID NO: 40065 - DNA, 33 bp, Homo sapiens
ccttgatctgcttaaaattacagtaatatcact

SEQ ID NO: 40066 - DNA, 33 bp, Homo sapiens
gtttgctggaccaaaccgaacagactgcagtac

SEQ ID NO: 40067 - DNA, 33 bp, Homo sapiens
gagtctgagatgtcccaccctaacaccaaatga

SEQ ID NO: 40068 - DNA, 33 bp, Homo sapiens
actttcatctgtttaacatattgccaaaatatc

SEQ ID NO: 40069 - DNA, 33 bp, Homo sapiens
ctgaccatacaaccaaacaatccctggctagac

SEQ ID NO: 40070 - DNA, 33 bp, Homo sapiens
gaattagaaaaaactacgctgaatttcatatgc

SEQ ID NO: 40071 - DNA, 33 bp, Homo sapiens
ggtttacttttgtttccatgtgagcatatgcgt

SEQ ID NO: 40072 - DNA, 33 bp, Homo sapiens
atgatttgcaatgtgggactacaagcggccctc

SEQ ID NO: 40073 - DNA, 33 bp, Homo sapiens
gagtgcttttttctgtcaagcgtaattagtgca

SEQ ID NO: 40074 - DNA, 33 bp, Homo sapiens
aaaagacattgttttgaaacctgagtacatgga

SEQ ID NO: 40075 - DNA, 33 bp, Homo sapiens
gcctctgatttcaccacgctgcactgtatccat

SEQ ID NO: 40076 - DNA, 33 bp, Homo sapiens
agtgtaaaaatatgacagtacatacgtatgaaa

SEQ ID NO: 40077 - DNA, 33 bp, Homo sapiens
gaaggttataaaggaacagtggctgaaattgtt

SEQ ID NO: 40078 - DNA, 33 bp, Homo sapiens
ccccaactgtctttcaccttagtctttcctttc

SEQ ID NO: 40079 - DNA, 33 bp, Homo sapiens
gtcaggttactgccacgaaataaaaactatgga

SEQ ID NO: 40080 - DNA, 33 bp, Homo sapiens
catgccatagaaacataagaggactactgcagt

SEQ ID NO: 40081 - DNA, 33 bp, Homo sapiens
atgtaaagtatagtacagcagttccctcttacc

SEQ ID NO: 40082 - DNA, 33 bp, Homo sapiens
gaaataagtgttttaccaccaaatatcttttct

SEQ ID NO: 40083 - DNA, 33 bp, Homo sapiens
aagtattgcgaattcaacatttagcagagacac

SEQ ID NO: 40084 - DNA, 33 bp, Homo sapiens
aaagacagtttttaacagatgcccattaaaatg

SEQ ID NO: 40085 - DNA, 33 bp, Homo sapiens
tccacaatgattttcaactctcctgggtattca

SEQ ID NO: 40086 - DNA, 33 bp, Homo sapiens
ttagctcttcaagggaactctatgctgtttccc

SEQ ID NO: 40087 - DNA, 33 bp, Homo sapiens
cacatgacccgctaacaattcttctatctttta

SEQ ID NO: 40088 - DNA, 33 bp, Homo sapiens
agagagtttgtagctgaaaaagaatagggatag

SEQ ID NO: 40089 - DNA, 33 bp, Homo sapiens
ttcaagcctactctctgaatcctatactacact

SEQ ID NO: 40090 - DNA, 33 bp, Homo sapiens
aagtgattttgtggcactgaaatccctttttca

SEQ ID NO: 40091 - DNA, 33 bp, Homo sapiens
aagtctcttaaggcccagacctagaagtcacag

SEQ ID NO: 40092 - DNA, 33 bp, Homo sapiens
ctacactcagctggtccatgttactttcctacc

SEQ ID NO: 40093 - DNA, 33 bp, Homo sapiens
tgtagaagcaagtcctaacttttgaactttggc

SEQ ID NO: 40094 - DNA, 33 bp, Homo sapiens
attattcaaagcagagaaaattgctgcctgaag

SEQ ID NO: 40095 - DNA, 33 bp, Homo sapiens
aattcaggcaactccaaagacatggatatggaa

SEQ ID NO: 40096 - DNA, 33 bp, Homo sapiens
tcaggagagttggttacgtgaaaagaatgtgca

SEQ ID NO: 40097 - DNA, 33 bp, Homo sapiens
aacaggttctataaaacaatgagagagtgtaat

SEQ ID NO: 40098 - DNA, 33 bp, Homo sapiens
caggtaacaataacacagaacaaaataatagaa

SEQ ID NO: 40099 - DNA, 33 bp, Homo sapiens
aggtgaagacaactataaaagatgacactgggc

SEQ ID NO: 40100 - DNA, 33 bp, Homo sapiens
ggtcctttcctcctcaaagagttctcagtgagc

SEQ ID NO: 40101 - DNA, 33 bp, Homo sapiens
acattgacaaagtacaaggttagaaatacaaac

SEQ ID NO: 40102 - DNA, 33 bp, Homo sapiens
aggctgccatcttatgcagacttacagaaaaag

SEQ ID NO: 40103 - DNA, 33 bp, Homo sapiens
gaaccaagaagttaagacacaacacagagtttc

SEQ ID NO: 40104 - DNA, 33 bp, Homo sapiens
tggggttgttgtattaaatgaactaatgtatgc

SEQ ID NO: 40105 - DNA, 33 bp, Homo sapiens
ccgaaggctggtctgacggatagtgaatagtaa

SEQ ID NO: 40106 - DNA, 33 bp, Homo sapiens
tccagaaactggcacacccaatcagtccttgcc

SEQ ID NO: 40107 - DNA, 33 bp, Homo sapiens
gccctgccttttcctcaccattgttcagacaag

SEQ ID NO: 40108 - DNA, 33 bp, Homo sapiens
atcatcgccatctctgcagtccttgtaatgtga

SEQ ID NO: 40109 - DNA, 51 bp, Homo sapiens
tctgttattaagcctctctcgctccactccttggtagcaattttcctaata

SEQ ID NO: 40110 - DNA, 33 bp, Homo sapiens
agtaggatttgaatcaggttacgttattttcta

SEQ ID NO: 40111 - DNA, 51 bp, Homo sapiens
ttaagtgaaggggacagccgagggacatattttaccatgacagccttgtag

SEQ ID NO: 40112 - DNA, 33 bp, Homo sapiens
tgaaatgcagcagaaaagaaaaggaataaacat

SEQ ID NO: 40113 - DNA, 33 bp, Homo sapiens
aatttaataggctagaccaacagtaaagtaact

SEQ ID NO: 40114 - DNA, 33 bp, Homo sapiens
agcacagtactgataaccttcaatcatatatgg

SEQ ID NO: 40115 - DNA, 33 bp, Homo sapiens
atggagagaactaggaaagtgaggagaacccca

SEQ ID NO: 40116 - DNA, 33 bp, Homo sapiens
gaaattcttgggtttgcaggatggtagataaga

SEQ ID NO: 40117 - DNA, 33 bp, Homo sapiens
tacgtctcactccaccaaatttacccaaagctg

SEQ ID NO: 40118 - DNA, 33 bp, Homo sapiens
aaaagtggattttgaaaagtggattaaattgct

SEQ ID NO: 40119 - DNA, 33 bp, Homo sapiens
catttctcagaacgtacccccatcgttaagtga

SEQ ID NO: 40120 - DNA, 33 bp, Homo sapiens
agaaagctggagctctaagacttaaagaatggg

SEQ ID NO: 40121 - DNA, 33 bp, Homo sapiens
tcaccaaagtggattaccaactttataacaaaa

SEQ ID NO: 40122 - DNA, 51 bp, Homo sapiens
attatgttgtcttgtcacacattctcaaacactggtgagagaggcagtgaa

SEQ ID NO: 40123 - DNA, 33 bp, Homo sapiens
ctccctttataggcaccgtctaatgactgactc

SEQ ID NO: 40124 - DNA, 33 bp, Homo sapiens
ggtggtattttcgccacgtacatccttaccttc

SEQ ID NO: 40125 - DNA, 51 bp, Homo sapiens
tctttccttttcatctctgttgctcaactgcactctctgacctacctgctt

SEQ ID NO: 40126 - DNA, 33 bp, Homo sapiens
ttttaagaactcaaagaattgtagccggtatgg

SEQ ID NO: 40127 - DNA, 33 bp, Homo sapiens
gaatagatgagactgaagaagttagctgtgata

SEQ ID NO: 40128 - DNA, 33 bp, Homo sapiens
tctccaggtacgagaactgtaatttcgaccctg

SEQ ID NO: 40129 - DNA, 51 bp, Homo sapiens
tctatctagacatctttcttcaaaccgtcagaagactgaatagagaaacag

SEQ ID NO: 40130 - DNA, 33 bp, Homo sapiens
cataatcatctaaaaacgttcttagaggaaaat

SEQ ID NO: 40131 - DNA, 33 bp, Homo sapiens
cttctccagagcaagaacccaaaaggaaacgaa

SEQ ID NO: 40132 - DNA, 33 bp, Homo sapiens
ttcttggcgcactaccagacactgggggacaca

SEQ ID NO: 40133 - DNA, 33 bp, Homo sapiens
ccccataacagtcacaatctaccctgacgtggg

SEQ ID NO: 40134 - DNA, 33 bp, Homo sapiens
tagtgtgtgtatagaacttccagttacaaagtg

SEQ ID NO: 40135 - DNA, 33 bp, Homo sapiens
gctaattcctgcaaagaatctgggacatatctg

SEQ ID NO: 40136 - DNA, 33 bp, Homo sapiens
actacagtttgaggaacgtttgttgaactaaac

SEQ ID NO: 40137 - DNA, 33 bp, Homo sapiens
ggttctgggcaggcaaactttttcttagagctt

SEQ ID NO: 40138 - DNA, 33 bp, Homo sapiens
ttctctgcttctgccacgactgaactgctgcca

SEQ ID NO: 40139 - DNA, 33 bp, Homo sapiens
tcaaggattgttaacaacttcttcgctttctga

SEQ ID NO: 40140 - DNA, 33 bp, Homo sapiens
tacagtgtaaagactcaactcctctgtccctct

SEQ ID NO: 40141 - DNA, 33 bp, Homo sapiens
ccatgatagatacagacgttagagcttcctcat

SEQ ID NO: 40142 - DNA, 33 bp, Homo sapiens
gactccaattttcatcccactttccccacataa

SEQ ID NO: 40143 - DNA, 33 bp, Homo sapiens
ttgtcagtcaatcctacgtaaaaattctcctct

SEQ ID NO: 40144 - DNA, 33 bp, Homo sapiens
caactaaggactctccaaggttttaaagctggg

SEQ ID NO: 40145 - DNA, 33 bp, Homo sapiens
cctacacatgttggttaaacaagacagctgtct

SEQ ID NO: 40146 - DNA, 33 bp, Homo sapiens
attgcttgagatcaaccatggtaggtatattta

SEQ ID NO: 40147 - DNA, 33 bp, Homo sapiens
tttaatcatcctgttccatatttggtgacctta

SEQ ID NO: 40148 - DNA, 33 bp, Homo sapiens
tgctcacatatggggcggatcctgactccaaaa

SEQ ID NO: 40149 - DNA, 33 bp, Homo sapiens
agggagataaccattaaatctgactgcccgaga

SEQ ID NO: 40150 - DNA, 33 bp, Homo sapiens
ctttagcatttgataaacacttgctaagacttt

SEQ ID NO: 40151 - DNA, 33 bp, Homo sapiens
actatgtgcaatgtatgaggaaagttctttggc

SEQ ID NO: 40152 - DNA, 33 bp, Homo sapiens
tgtccaggtccagggaacgattattgtccatgg

SEQ ID NO: 40153 - DNA, 51 bp, Homo sapiens
ctcccagccctcttagtggaataacaagatgactgttcagaccctaccatc

SEQ ID NO: 40154 - DNA, 33 bp, Homo sapiens
aactaatctcaaacaacgtttcccaaactgcct

SEQ ID NO: 40155 - DNA, 33 bp, Homo sapiens
ttcctgaaaagatgaacgagattgagaaacctt

SEQ ID NO: 40156 - DNA, 33 bp, Homo sapiens
agaacccacaagcccaaacaatcaccttagccc

SEQ ID NO: 40157 - DNA, 33 bp, Homo sapiens
actagtgattccaaagaaaccagcctctctctt

SEQ ID NO: 40158 - DNA, 51 bp, Homo sapiens
ccatcagcacccaaggcagatatagcaaggcagtcagccattcctcctaga

SEQ ID NO: 40159 - DNA, 33 bp, Homo sapiens
aaataagtgcaaataaaacaatgttgaggaact

SEQ ID NO: 40160 - DNA, 33 bp, Homo sapiens
ctcttcttatcactggcagcatcttatcacaat

SEQ ID NO: 40161 - DNA, 33 bp, Homo sapiens
ggaacactcaccaaccagatttgtgcatgtgtg

SEQ ID NO: 40162 - DNA, 33 bp, Homo sapiens
gcacatgaaatacagcagatggcagggctgaca

SEQ ID NO: 40163 - DNA, 33 bp, Homo sapiens
catgtagtcgttgtcacgcatcagatcatttaa

SEQ ID NO: 40164 - DNA, 33 bp, Homo sapiens
tgggaaacaggagttaaagtggaagcaacatta

SEQ ID NO: 40165 - DNA, 33 bp, Homo sapiens
gtgtacttccgggcgacagtgatgccaaaataa

SEQ ID NO: 40166 - DNA, 33 bp, Homo sapiens
gagaagttcttctgaaatgcagtataaaagata

SEQ ID NO: 40167 - DNA, 33 bp, Homo sapiens
agaactggtcagactcaaggtggctcctctgca

SEQ ID NO: 40168 - DNA, 33 bp, Homo sapiens
aatctggctaatgataagctggcaaaaaatttg

SEQ ID NO: 40169 - DNA, 33 bp, Homo sapiens
gtttccaatatttagcaatcattcacagcactg

SEQ ID NO: 40170 - DNA, 33 bp, Homo sapiens
ttcctcttcaaaataacgagaggttcagattag

SEQ ID NO: 40171 - DNA, 33 bp, Homo sapiens
aaacaacatatttgtaaggcaccttttatgtac

SEQ ID NO: 40172 - DNA, 33 bp, Homo sapiens
ttaaagagaagaaagaaatgctcatgtgaccag

SEQ ID NO: 40173 - DNA, 33 bp, Homo sapiens
gtgattatgatgatcaacctggtttaggaccca

SEQ ID NO: 40174 - DNA, 33 bp, Homo sapiens
ttcctctcccatttaccagcgataggagtggag

SEQ ID NO: 40175 - DNA, 33 bp, Homo sapiens
atgtttggttaaggaacgaacaggagacctagc

SEQ ID NO: 40176 - DNA, 33 bp, Homo sapiens
aattctaccccgacaacctcagcttctgcctat

SEQ ID NO: 40177 - DNA, 33 bp, Homo sapiens
ttcattttccagcaatgatgcctactttgcagt

SEQ ID NO: 40178 - DNA, 33 bp, Homo sapiens
caaggaaatggaagtaaaagtattgttccagtc

SEQ ID NO: 40179 - DNA, 33 bp, Homo sapiens
cccatctcaaagataaactcagctaaacatatc

SEQ ID NO: 40180 - DNA, 33 bp, Homo sapiens
gcttcctgttgaataaggtatatctgtcaatag

SEQ ID NO: 40181 - DNA, 51 bp, Homo sapiens
gggaatgagaatttaacccaggagaagggaatgctttaagaaaatctcata

SEQ ID NO: 40182 - DNA, 33 bp, Homo sapiens
gaatcttgccatcccaatcatgaaaagaaactg

SEQ ID NO: 40183 - DNA, 33 bp, Homo sapiens
tgtgggttcaggataaatatcggtaatacaaga

SEQ ID NO: 40184 - DNA, 33 bp, Homo sapiens
ctacctaatatctttacatccttacctcaaaac

SEQ ID NO: 40185 - DNA, 33 bp, Homo sapiens
gcagatggatgtttaaaacttttcaaagtagtt

SEQ ID NO: 40186 - DNA, 33 bp, Homo sapiens
caaattctagctcttcaacatttgacaatactg

SEQ ID NO: 40187 - DNA, 33 bp, Homo sapiens
gagaagtgaagaaaagcagatttcactcagtct

SEQ ID NO: 40188 - DNA, 33 bp, Homo sapiens
aagaaagatttgatgacgttaacttttctagga

SEQ ID NO: 40189 - DNA, 33 bp, Homo sapiens
actaaaaagtttttcactcctgagaatccttca

SEQ ID NO: 40190 - DNA, 33 bp, Homo sapiens
tttcagaattcacaaaccctttaataactgcag

SEQ ID NO: 40191 - DNA, 33 bp, Homo sapiens
tcagtgacaaaaagaacattggtgcttttacac

SEQ ID NO: 40192 - DNA, 51 bp, Homo sapiens
tccttcattattatttcaagttttaaatacatagctaagggaatatgctgt

SEQ ID NO: 40193 - DNA, 33 bp, Homo sapiens
cctgagacacccttcacagtcgtgctacaggaa

SEQ ID NO: 40194 - DNA, 33 bp, Homo sapiens
gtttagattcagttagaatgtgtataggtgtat

SEQ ID NO: 40195 - DNA, 33 bp, Homo sapiens
taccgatgtgttgtgaaaaaacaatctcagaag

SEQ ID NO: 40196 - DNA, 33 bp, Homo sapiens
gaccacataaaaagaaaggtttacacagctaaa

SEQ ID NO: 40197 - DNA, 33 bp, Homo sapiens
ttccttggcaaaacacccaagttgaaaacctca

SEQ ID NO: 40198 - DNA, 33 bp, Homo sapiens
gggggatctctttttactgaggtatactgtggg

SEQ ID NO: 40199 - DNA, 33 bp, Homo sapiens
ttggtgtgtgatgctacgtaaactctgttaacc

SEQ ID NO: 40200 - DNA, 33 bp, Homo sapiens
attagataacttcaaacagtgacaaccttgcag

SEQ ID NO: 40201 - DNA, 33 bp, Homo sapiens
atacggattccaggtacgctcaaaaaaacacaa

SEQ ID NO: 40202 - DNA, 33 bp, Homo sapiens
ttcatagctccctgtacgtttacttcacagcac

SEQ ID NO: 40203 - DNA, 33 bp, Homo sapiens
gataaaatactagaacagaatcaacagattaca

SEQ ID NO: 40204 - DNA, 33 bp, Homo sapiens
ttgctttggccacagaaatcatgatgagtataa

SEQ ID NO: 40205 - DNA, 33 bp, Homo sapiens
aaggtaaaggctgccaatagttggtgggaaata

SEQ ID NO: 40206 - DNA, 33 bp, Homo sapiens
gacagatttgcttcagaatggtggtttggctct

SEQ ID NO: 40207 - DNA, 33 bp, Homo sapiens
ccattccatgcagagaccctcagagtatccctg

SEQ ID NO: 40208 - DNA, 33 bp, Homo sapiens
gttagaaaaaatatcaaaacataataggccaag

SEQ ID NO: 40209 - DNA, 33 bp, Homo sapiens
ttagccacatagtcatcataagtgattacattt

SEQ ID NO: 40210 - DNA, 51 bp, Homo sapiens
caagtataatataataagctaatagaatacgaatatagaggaagatatctg

SEQ ID NO: 40211 - DNA, 33 bp, Homo sapiens
gggttgtctcattacaaacttatccctcctccc

SEQ ID NO: 40212 - DNA, 33 bp, Homo sapiens
acatattattggtcaagaaaagcatgaaaactg

SEQ ID NO: 40213 - DNA, 33 bp, Homo sapiens
agagccaaactatctcaatatcaaaacaggtag

SEQ ID NO: 40214 - DNA, 33 bp, Homo sapiens
attatgggagaattaaacatcttctatgctcta

SEQ ID NO: 40215 - DNA, 33 bp, Homo sapiens
gaggctctcactagacacattctcaatactgtc

SEQ ID NO: 40216 - DNA, 33 bp, Homo sapiens
tgaatcaacaactgaccgtataaaactatgctt

SEQ ID NO: 40217 - DNA, 33 bp, Homo sapiens
acataggatttaatcactccttgcccataaact

SEQ ID NO: 40218 - DNA, 33 bp, Homo sapiens
gattaatatatgttgtaaaggccaagcaactcc

SEQ ID NO: 40219 - DNA, 33 bp, Homo sapiens
tacacttactaaaagacaattccacacgctaga

SEQ ID NO: 40220 - DNA, 33 bp, Homo sapiens
ctgtaagtataatgcaaattcccaaatctgaga

SEQ ID NO: 40221 - DNA, 33 bp, Homo sapiens
ttgggagacagaaggtaaaccatatgtggagaa

SEQ ID NO: 40222 - DNA, 33 bp, Homo sapiens
tgcatcagttgacgaccatttgagtcattttta

SEQ ID NO: 40223 - DNA, 33 bp, Homo sapiens
gaatctcacacttaacaacaaggcttaaacatc

SEQ ID NO: 40224 - DNA, 33 bp, Homo sapiens
tgaaagccgattacacaaagtcatttgggtttg

SEQ ID NO: 40225 - DNA, 33 bp, Homo sapiens
ggcagtactaccaatcacataaagaagtattca

SEQ ID NO: 40226 - DNA, 33 bp, Homo sapiens
tcatctatcagccctacggtgtccccacagccc

SEQ ID NO: 40227 - DNA, 33 bp, Homo sapiens
gacttagacattaagaagatccctagctggaaa

SEQ ID NO: 40228 - DNA, 33 bp, Homo sapiens
taccccacattctaaaataagaggacaatgaga

SEQ ID NO: 40229 - DNA, 33 bp, Homo sapiens
ccgtccaatcaacaaccgagtgtcttcaacctc

SEQ ID NO: 40230 - DNA, 33 bp, Homo sapiens
ggtagatttccagatacacagtcatgcatctca

SEQ ID NO: 40231 - DNA, 33 bp, Homo sapiens
gcagtcacataatctacagaaaggacaagttaa

SEQ ID NO: 40232 - DNA, 33 bp, Homo sapiens
atatgtgtcttgaaaaatagggaatttacaata

SEQ ID NO: 40233 - DNA, 33 bp, Homo sapiens
ccacttccactcaatgaacaagtgaatatattt

SEQ ID NO: 40234 - DNA, 33 bp, Homo sapiens
acaaggctacaaacacagataatacaattgctg

SEQ ID NO: 40235 - DNA, 33 bp, Homo sapiens
aatcagtcccttccacagccattgaacttttgg

SEQ ID NO: 40236 - DNA, 33 bp, Homo sapiens
tcacaccctcatttggacaaaggagctgttggc

SEQ ID NO: 40237 - DNA, 33 bp, Homo sapiens
tcttcatttgcaaaacagtaaaaatcatttcta

SEQ ID NO: 40238 - DNA, 33 bp, Homo sapiens
gaggtgagctctaaccagaggatatagggggga

SEQ ID NO: 40239 - DNA, 33 bp, Homo sapiens
ttgacaggcgaaagaaatgggattatggcactt

SEQ ID NO: 40240 - DNA, 33 bp, Homo sapiens
ctagcctcattcttggaatttacatccccagga

SEQ ID NO: 40241 - DNA, 33 bp, Homo sapiens
ctgcaccatacataagaaggacttggaaggaaa

SEQ ID NO: 40242 - DNA, 33 bp, Homo sapiens
taactggatgactctgcagtagctctcttccaa

SEQ ID NO: 40243 - DNA, 33 bp, Homo sapiens
caccagacaggagaaacacaatgagaatggagg

SEQ ID NO: 40244 - DNA, 33 bp, Homo sapiens
catcaaatggcccaacaaactgcaagtaatgat

SEQ ID NO: 40245 - DNA, 33 bp, Homo sapiens
ggagacaaagcctaaccatatcattccacttat

SEQ ID NO: 40246 - DNA, 51 bp, Homo sapiens
atatccattatttgcatagcaacaactaggaaatagcctacatgtccaaat

SEQ ID NO: 40247 - DNA, 51 bp, Homo sapiens
cactatacttgcctaggtaactaacacatggattatacattttaatgtgtg

SEQ ID NO: 40248 - DNA, 33 bp, Homo sapiens
tgtcctggtgcctaccacatagggtttcttcct

SEQ ID NO: 40249 - DNA, 33 bp, Homo sapiens
caaaaggaaaaaaagtcacaggctaagagaggt

SEQ ID NO: 40250 - DNA, 33 bp, Homo sapiens
agaaaaagtctagtgacgctagagggagattaa

SEQ ID NO: 40251 - DNA, 33 bp, Homo sapiens
tgtaatttccgcacaaaaacttttacacacatg

SEQ ID NO: 40252 - DNA, 33 bp, Homo sapiens
acaagaaccacggccaaagccacacttcacatt

SEQ ID NO: 40253 - DNA, 51 bp, Homo sapiens
ttgttaaaaagatgcaacatttctacctccaagaagtttgaaatatataaa

SEQ ID NO: 40254 - DNA, 33 bp, Homo sapiens
ttacagatgaggaaagaacagttcagaaagctt

SEQ ID NO: 40255 - DNA, 33 bp, Homo sapiens
aatacctgaactacccaaaagttaaatgcacca

SEQ ID NO: 40256 - DNA, 33 bp, Homo sapiens
gctgaatgatgttagcaccaagtgagacttact

SEQ ID NO: 40257 - DNA, 33 bp, Homo sapiens
atcttagcaaaggaaacgaatgttcagtccaat

SEQ ID NO: 40258 - DNA, 33 bp, Homo sapiens
ttcagctacttattaggcagcctagaaaaataa

SEQ ID NO: 40259 - DNA, 33 bp, Homo sapiens
attaggctgccatggaataactgtatgttggcc

SEQ ID NO: 40260 - DNA, 33 bp, Homo sapiens
ataattcctgagatcacaacaagaggtctactt

SEQ ID NO: 40261 - DNA, 33 bp, Homo sapiens
caggaaattatctgtcaaatccttctttttaag

SEQ ID NO: 40262 - DNA, 33 bp, Homo sapiens
catagtagaaaacaaacagggaagatacggtta

SEQ ID NO: 40263 - DNA, 51 bp, Homo sapiens
ctccttcaaattcaccctattccagcatgcacttggcctcagggcatcacc

SEQ ID NO: 40264 - DNA, 33 bp, Homo sapiens
acgactagctcttaaaatacatatttggatatg

SEQ ID NO: 40265 - DNA, 33 bp, Homo sapiens
gaagccattttttagggattcactcagaagata

SEQ ID NO: 40266 - DNA, 33 bp, Homo sapiens
gttgtttttcccctccccatatagccgaacatt

SEQ ID NO: 40267 - DNA, 33 bp, Homo sapiens
agaggagcattaaaaaattggggcatttcatct

SEQ ID NO: 40268 - DNA, 33 bp, Homo sapiens
gaaagtaatgttctaaagtctttggaagtcagt

SEQ ID NO: 40269 - DNA, 33 bp, Homo sapiens
ataccttgccaggtacacaagagcttaaaattt

SEQ ID NO: 40270 - DNA, 33 bp, Homo sapiens
taatgctttaaatacacataccacaaatactac

SEQ ID NO: 40271 - DNA, 33 bp, Homo sapiens
cagagaaacactttcaggcaaaccttgaagact

SEQ ID NO: 40272 - DNA, 33 bp, Homo sapiens
gtgtgatcgatctatcccttagctgaacaaatt

SEQ ID NO: 40273 - DNA, 33 bp, Homo sapiens
tcagaggatccaggaacctcactgtatgcaaag

SEQ ID NO: 40274 - DNA, 33 bp, Homo sapiens
agagtgactcatcttcacaaaaagatacattaa

SEQ ID NO: 40275 - DNA, 33 bp, Homo sapiens
tacagcctggagctaaatcctaaaggtgcccat

SEQ ID NO: 40276 - DNA, 33 bp, Homo sapiens
acatgactgttaaatacatttctgaacaatttg

SEQ ID NO: 40277 - DNA, 33 bp, Homo sapiens
atagagagagcacaaagttaagaaacacaagaa

SEQ ID NO: 40278 - DNA, 33 bp, Homo sapiens
gccatattgactttaaaaaatcccatgcaggcc

SEQ ID NO: 40279 - DNA, 33 bp, Homo sapiens
catttagggcagaagaaatagctcataaaaagg

SEQ ID NO: 40280 - DNA, 51 bp, Homo sapiens
tgaataactttgtaaaacccaagcacataatttctacaatatccctattag

SEQ ID NO: 40281 - DNA, 51 bp, Homo sapiens
ttctagcagttatgttttaattaagaatgtagctattgtttgaatgtgtca

SEQ ID NO: 40282 - DNA, 33 bp, Homo sapiens
gacaagataattaaggaatcaaggaaaagtgaa

SEQ ID NO: 40283 - DNA, 33 bp, Homo sapiens
ttttgtgtgtgccttcaatttttaaatatagta

SEQ ID NO: 40284 - DNA, 33 bp, Homo sapiens
ggtaactagttagaaaatgcctaatatggacaa

SEQ ID NO: 40285 - DNA, 33 bp, Homo sapiens
gttttcctggatcgtcgcaatgcttgtggattt

SEQ ID NO: 40286 - DNA, 33 bp, Homo sapiens
atcagaagactggttacgagagtgctgcaatca

SEQ ID NO: 40287 - DNA, 33 bp, Homo sapiens
agtcttctgatacccaagctctcaactctcatc

SEQ ID NO: 40288 - DNA, 33 bp, Homo sapiens
agatctgtattacctcacttactaatcaacacc

SEQ ID NO: 40289 - DNA, 51 bp, Homo sapiens
agtttcagacaggtacactaccttacgcaataatacacagccagtatcctg

SEQ ID NO: 40290 - DNA, 33 bp, Homo sapiens
gtctttgaaattctcaagaaaaattatttgaca

SEQ ID NO: 40291 - DNA, 33 bp, Homo sapiens
gttttaaatgcggatccacataagtcccaaatc

SEQ ID NO: 40292 - DNA, 33 bp, Homo sapiens
tcccaaaacagtatcaaaactctgccctctctt

SEQ ID NO: 40293 - DNA, 51 bp, Homo sapiens
aatgtgtcccctacctgcaggaagaatgacctcccattcctagcagaaatg

SEQ ID NO: 40294 - DNA, 51 bp, Homo sapiens
gtagcaattggctacctttaagtaccaactttcagtaattcttgccacttt

SEQ ID NO: 40295 - DNA, 33 bp, Homo sapiens
gctatactctaaagaacggggaggcttaagttt

SEQ ID NO: 40296 - DNA, 51 bp, Homo sapiens
cagctaccactcagattaacctgataagcacttgtgtattatttgcacttt

SEQ ID NO: 40297 - DNA, 33 bp, Homo sapiens
aggcttttattaggtacgaagatgagtgtcaca

SEQ ID NO: 40298 - DNA, 33 bp, Homo sapiens
tgtacaattctctccccgcattgcctgagtgta

SEQ ID NO: 40299 - DNA, 33 bp, Homo sapiens
caagggtccaaaaaaacagactggtacttataa

SEQ ID NO: 40300 - DNA, 33 bp, Homo sapiens
atagggaagatcgttacgtgctaaaatacagct

SEQ ID NO: 40301 - DNA, 33 bp, Homo sapiens
taaacgttagcaggtaaggacattaaaacagtt

SEQ ID NO: 40302 - DNA, 33 bp, Homo sapiens
ctcatcagagccgtatcataatcaagagctgac

SEQ ID NO: 40303 - DNA, 33 bp, Homo sapiens
cattgttccattttgccagacattgtattatct

SEQ ID NO: 40304 - DNA, 33 bp, Homo sapiens
atcaacatttttctcaacttataatgccatctc

SEQ ID NO: 40305 - DNA, 51 bp, Homo sapiens
aaccctgaactcgtgggtatttgtacattcaggtagtagttgcgtccctat

SEQ ID NO: 40306 - DNA, 51 bp, Homo sapiens
ggtggatgggtgcagcaaacaattacgacacttgtctacctatgtaacaaa

SEQ ID NO: 40307 - DNA, 33 bp, Homo sapiens
gacctacctgtggataagttctactggactcct

SEQ ID NO: 40308 - DNA, 33 bp, Homo sapiens
acttattagaaaagtaagcagaaaacctgaatg

SEQ ID NO: 40309 - DNA, 33 bp, Homo sapiens
taaaaataaggttataaaaagagtctgagcgaa

SEQ ID NO: 40310 - DNA, 33 bp, Homo sapiens
gaaatatcaactggaaaaatgaaaaagtgatca

SEQ ID NO: 40311 - DNA, 33 bp, Homo sapiens
taactttctgagttacacctagagtacatggaa

SEQ ID NO: 40312 - DNA, 33 bp, Homo sapiens
atgtcataggtttctggaaaagacagacacaga

SEQ ID NO: 40313 - DNA, 33 bp, Homo sapiens
agcaagtgcctttatacagttccatgaagcata

SEQ ID NO: 40314 - DNA, 33 bp, Homo sapiens
actcttcttgggctaacatgagtcaaaataata

SEQ ID NO: 40315 - DNA, 33 bp, Homo sapiens
cctcaaagcacattccacaaactgacacagaag

SEQ ID NO: 40316 - DNA, 51 bp, Homo sapiens
gtttaaagagcaatctttgtaataaataagctcatgatgtttgggatcaga

SEQ ID NO: 40317 - DNA, 33 bp, Homo sapiens
tgtccaagatctctccaagtcaactttctaaaa

SEQ ID NO: 40318 - DNA, 33 bp, Homo sapiens
attaccaaatgatatacgatttttctacatggc

SEQ ID NO: 40319 - DNA, 33 bp, Homo sapiens
tgctaagcaatggtggaaaatatcttttttcaa

SEQ ID NO: 40320 - DNA, 33 bp, Homo sapiens
gataggaagggtagatcacaactgccttgttca

SEQ ID NO: 40321 - DNA, 33 bp, Homo sapiens
ttaaattcaaactgacacctccaaaatcaacac

SEQ ID NO: 40322 - DNA, 33 bp, Homo sapiens
ctaagtgagaactgctcacactgtctatagcaa

SEQ ID NO: 40323 - DNA, 33 bp, Homo sapiens
taactttagttcagaaaagaaaggtgttaaaat

SEQ ID NO: 40324 - DNA, 51 bp, Homo sapiens
aaatctgaaatttgagcaacacagaactttgggggtttgccacctttttag

SEQ ID NO: 40325 - DNA, 33 bp, Homo sapiens
agggaggcaaattaccgaagctgcaatttcctg

SEQ ID NO: 40326 - DNA, 33 bp, Homo sapiens
gtctgacatgtgaggacatggtgaaaagaccat

SEQ ID NO: 40327 - DNA, 33 bp, Homo sapiens
tttcctttctcatctaacattgtttaattgtcc

SEQ ID NO: 40328 - DNA, 33 bp, Homo sapiens
ctgtctccactttccaacacattcctttctttg

SEQ ID NO: 40329 - DNA, 33 bp, Homo sapiens
ttggggaagacaagctcacaagtagtttcatta

SEQ ID NO: 40330 - DNA, 33 bp, Homo sapiens
aggtgcgcaacaagaaagtacagcctttggagg

SEQ ID NO: 40331 - DNA, 33 bp, Homo sapiens
catctgtggatcatgcactacgctaatatctaa

SEQ ID NO: 40332 - DNA, 33 bp, Homo sapiens
tagctttgcactcaacaaaactccaaatcctaa

SEQ ID NO: 40333 - DNA, 33 bp, Homo sapiens
tgtgtggaaaagaagggacagtcgttgggaata

SEQ ID NO: 40334 - DNA, 33 bp, Homo sapiens
ctccctgccatcaaacaatatacactttggtga

SEQ ID NO: 40335 - DNA, 33 bp, Homo sapiens
ttgaattagaaagtgggatattcaaggagcaat

SEQ ID NO: 40336 - DNA, 33 bp, Homo sapiens
accttattagactgaaagtagaaaatgtctatt

SEQ ID NO: 40337 - DNA, 33 bp, Homo sapiens
tctgcactgcacttgacgtgtatgtactgacta

SEQ ID NO: 40338 - DNA, 33 bp, Homo sapiens
ggaacaacaaagtggaagtttctggttattttc

SEQ ID NO: 40339 - DNA, 33 bp, Homo sapiens
ttctccactctcaaaacgaagactggtttgcaa

SEQ ID NO: 40340 - DNA, 33 bp, Homo sapiens
cactatttgggtgacaagtaccctaaaagtcca

SEQ ID NO: 40341 - DNA, 33 bp, Homo sapiens
ccagatggtttgtccacaaatcagctttcttgt

SEQ ID NO: 40342 - DNA, 33 bp, Homo sapiens
tgaagacaagtaaactcacagattgtcataaat

SEQ ID NO: 40343 - DNA, 33 bp, Homo sapiens
aaatcatcactaaaacaacattgatacacatat

SEQ ID NO: 40344 - DNA, 33 bp, Homo sapiens
tgtcactttgtgatagaaatttttcagttgcat

SEQ ID NO: 40345 - DNA, 33 bp, Homo sapiens
tatagaggatgaagcacgtttaaaaattggaca

SEQ ID NO: 40346 - DNA, 33 bp, Homo sapiens
tcatgaagttcaaggaagggcttgattagaacg

SEQ ID NO: 40347 - DNA, 51 bp, Homo sapiens
aaaacattgtggtcactcctaaaagaaacctagcacccattagcagtctct

SEQ ID NO: 40348 - DNA, 33 bp, Homo sapiens
cctaaccttgtgttcacgcgtaggtgtttagtt

SEQ ID NO: 40349 - DNA, 33 bp, Homo sapiens
tatagcaggaaacttccacatttttgttactga

SEQ ID NO: 40350 - DNA, 33 bp, Homo sapiens
tgacaatatgtggatgcacaatcttgcttcttt

SEQ ID NO: 40351 - DNA, 33 bp, Homo sapiens
tgtaagtatgagcaaaaacttgtaaaattaaaa

SEQ ID NO: 40352 - DNA, 33 bp, Homo sapiens
atgatctgtaccaggcaatgcttccattccaat

SEQ ID NO: 40353 - DNA, 51 bp, Homo sapiens
aatatatcaggaaccaccgatattcatgagatatgccatatatttttattt

SEQ ID NO: 40354 - DNA, 33 bp, Homo sapiens
gtccagtccggcgatacgcttgtcgcttgtatt

SEQ ID NO: 40355 - DNA, 33 bp, Homo sapiens
ctgagattcacttatacatactcgaactattca

SEQ ID NO: 40356 - DNA, 33 bp, Homo sapiens
aatcaaacaccacttaggtcatataaatctttt

SEQ ID NO: 40357 - DNA, 33 bp, Homo sapiens
acatagttggtcattaagcacttacaaaaaaag

SEQ ID NO: 40358 - DNA, 51 bp, Homo sapiens
tttttcctatttttaaatgtgattacggtgattacctaagaccattagtgg

SEQ ID NO: 40359 - DNA, 33 bp, Homo sapiens
ccaagagtcactcttacgttgacttctaacatc

SEQ ID NO: 40360 - DNA, 33 bp, Homo sapiens
gcagcaggaaggttaacgactgaaagggctctc

SEQ ID NO: 40361 - DNA, 33 bp, Homo sapiens
aaaatcacctgtgtccaccaatgaatgagtgga

SEQ ID NO: 40362 - DNA, 51 bp, Homo sapiens
atcaatacatgaaaattgaggactgcgtatcaacaaatttagctcaagtgc

SEQ ID NO: 40363 - DNA, 51 bp, Homo sapiens
aaataatatattaatctaagacttcagaaagaaacaaacccacaaataata

SEQ ID NO: 40364 - DNA, 33 bp, Homo sapiens
ccatacaacaaaatggaaagaagtgtgatggtg

SEQ ID NO: 40365 - DNA, 33 bp, Homo sapiens
aaattgttaccaggaaagaaggcaggaagaaga

SEQ ID NO: 40366 - DNA, 33 bp, Homo sapiens
aggaatagtgagagtacagttgggagtgtgaga

SEQ ID NO: 40367 - DNA, 33 bp, Homo sapiens
cttaatcttgtctctcaaacattacttgacatc

SEQ ID NO: 40368 - DNA, 33 bp, Homo sapiens
tttgaacttcctgctacataacataactaccca

SEQ ID NO: 40369 - DNA, 33 bp, Homo sapiens
tcatagttttctttggccattcctagagaattg

SEQ ID NO: 40370 - DNA, 33 bp, Homo sapiens
ccttaagcagtcacagcaatgatgtcatattga

SEQ ID NO: 40371 - DNA, 33 bp, Homo sapiens
ctgctcgtaatatcagcattagagcaagtagga

SEQ ID NO: 40372 - DNA, 33 bp, Homo sapiens
ccctcacttgagtgaaactgcaaattatcacta

SEQ ID NO: 40373 - DNA, 51 bp, Homo sapiens
gttgcctcatactctctcctcacagaaaaaggcagattgaggctgctgggt

SEQ ID NO: 40374 - DNA, 33 bp, Homo sapiens
agctctgcagacctgacagatgtggcaaataca

SEQ ID NO: 40375 - DNA, 33 bp, Homo sapiens
tatcatcagctacaccaaacactcaagtgtagc

SEQ ID NO: 40376 - DNA, 33 bp, Homo sapiens
gatattgaatggtttccaatcttccatattacc

SEQ ID NO: 40377 - DNA, 33 bp, Homo sapiens
ttggccagcaatgaacaaatgattttgcctcac

SEQ ID NO: 40378 - DNA, 33 bp, Homo sapiens
tacaaataggacatcacgaaaactgcatcaaat

SEQ ID NO: 40379 - DNA, 33 bp, Homo sapiens
ttttgacattgcaaaccgaaaaattcacttcta

SEQ ID NO: 40380 - DNA, 33 bp, Homo sapiens
actccttctggaaacaactgcttcttatccttc

SEQ ID NO: 40381 - DNA, 33 bp, Homo sapiens
taagacttttacttgacgttgaaattacagtca

SEQ ID NO: 40382 - DNA, 33 bp, Homo sapiens
tggatcactacagtgaagtattacagttgtaca

SEQ ID NO: 40383 - DNA, 33 bp, Homo sapiens
ttatttgtgagccataaaatgaagtagtaaaat

SEQ ID NO: 40384 - DNA, 33 bp, Homo sapiens
ttgagtccacactatacgtcaggctgtactagc

SEQ ID NO: 40385 - DNA, 33 bp, Homo sapiens
aaatgagatatagaaaattgttccagactgcac

SEQ ID NO: 40386 - DNA, 33 bp, Homo sapiens
tttaattcatgtgctacctatggagtcttttaa

SEQ ID NO: 40387 - DNA, 33 bp, Homo sapiens
actatagccacgggagaaagatattagaattgg

SEQ ID NO: 40388 - DNA, 33 bp, Homo sapiens
caagcagcataggacacgtagttgaagcaagag

SEQ ID NO: 40389 - DNA, 33 bp, Homo sapiens
catggaaaacaggttacagtggcaaggatagaa

SEQ ID NO: 40390 - DNA, 51 bp, Homo sapiens
ggtttatagagttatactcagttaccgacagatctaaaatgaacttcttcc

SEQ ID NO: 40391 - DNA, 33 bp, Homo sapiens
tagatatgagtaggagcatccaggttagacata

SEQ ID NO: 40392 - DNA, 33 bp, Homo sapiens
taaaatcactgaagaaatattccactatttatg

SEQ ID NO: 40393 - DNA, 33 bp, Homo sapiens
gccgggcagtaacctacaagtatttaccagttc

SEQ ID NO: 40394 - DNA, 33 bp, Homo sapiens
tttactaagttttacaaatcaggcaaacctcat

SEQ ID NO: 40395 - DNA, 33 bp, Homo sapiens
tgtactagcagaattactaaagaagttacagat

SEQ ID NO: 40396 - DNA, 33 bp, Homo sapiens
ttgatcttgccagtaaacgagatatttgatgat

SEQ ID NO: 40397 - DNA, 33 bp, Homo sapiens
acaattggatttggaaaattgacctaatgtcag

SEQ ID NO: 40398 - DNA, 33 bp, Homo sapiens
catgctatatggcacaacaaaacttaaatgaaa

SEQ ID NO: 40399 - DNA, 33 bp, Homo sapiens
caagcacacctaatgcacaagtcttgatttcta

SEQ ID NO: 40400 - DNA, 33 bp, Homo sapiens
tgttttcatgaatcaaattacacctttgttcac

SEQ ID NO: 40401 - DNA, 33 bp, Homo sapiens
gattccattatcataaatgcagaggctgagagg

SEQ ID NO: 40402 - DNA, 33 bp, Homo sapiens
ctttgggatttcaggaaattaaccgatttataa

SEQ ID NO: 40403 - DNA, 51 bp, Homo sapiens
ccctctggatctcttaattagcctacgtttcttaaataaaaatttattttt

SEQ ID NO: 40404 - DNA, 51 bp, Homo sapiens
gcttttaagatttgagtttaaaatagtactgattgaaaaaataaattttta

SEQ ID NO: 40405 - DNA, 33 bp, Homo sapiens
tgtctctgactaaatacgagtaatgtgcacact

SEQ ID NO: 40406 - DNA, 33 bp, Homo sapiens
taacaggagtttatcacggttgttcttatgttc

SEQ ID NO: 40407 - DNA, 33 bp, Homo sapiens
gtagtatctttataaccaagacagtaagattta

SEQ ID NO: 40408 - DNA, 51 bp, Homo sapiens
tgacccattatattaacaaacaccacgtccttgtgctgaagttatggaagt

SEQ ID NO: 40409 - DNA, 33 bp, Homo sapiens
taattactgatttgtgcagtaggaagggctcaa

SEQ ID NO: 40410 - DNA, 33 bp, Homo sapiens
ttttctgactctaatcaccaattcaataagcac

SEQ ID NO: 40411 - DNA, 33 bp, Homo sapiens
agaagtatagtgaggtaaataagaaaacaggct

SEQ ID NO: 40412 - DNA, 33 bp, Homo sapiens
tagggtggaagcctataaatacgaaggaaaaat

SEQ ID NO: 40413 - DNA, 33 bp, Homo sapiens
aacagtaggctgagtacccaacactgatcataa

SEQ ID NO: 40414 - DNA, 33 bp, Homo sapiens
tatgggatatcaagaaaaaaagtaaacatcacc

SEQ ID NO: 40415 - DNA, 33 bp, Homo sapiens
tcctcatttccacccactcatacacttaaacat

SEQ ID NO: 40416 - DNA, 33 bp, Homo sapiens
atttggcccatttttcccatgctcatggccact

SEQ ID NO: 40417 - DNA, 51 bp, Homo sapiens
gagagtgattactatgtttaattgcaaagtcttacaaaaatttcaaaccag

SEQ ID NO: 40418 - DNA, 33 bp, Homo sapiens
agtcacttatgtagaacagttaaactatcaaaa

SEQ ID NO: 40419 - DNA, 33 bp, Homo sapiens
ataatcactattccaaatcacaaatcagagaag

SEQ ID NO: 40420 - DNA, 33 bp, Homo sapiens
gaatgtttgaataaccagaaggcaggaatctca

SEQ ID NO: 40421 - DNA, 33 bp, Homo sapiens
tttaacagtacctagaagaatgtttgaataacc

SEQ ID NO: 40422 - DNA, 33 bp, Homo sapiens
ttcattttcttcaacacgtgaaactttcagtgg

SEQ ID NO: 40423 - DNA, 33 bp, Homo sapiens
cacaggaagatagacaaagaaacaaatttagag

SEQ ID NO: 40424 - DNA, 33 bp, Homo sapiens
gtaatgttgtcaagtccaataaatcactattca

SEQ ID NO: 40425 - DNA, 33 bp, Homo sapiens
tgcaatgcagcatcaagtgccagaaagataggt

SEQ ID NO: 40426 - DNA, 33 bp, Homo sapiens
atgtgaacccaagcacaatggggttagccttca

SEQ ID NO: 40427 - DNA, 33 bp, Homo sapiens
catgtttaaaaggcaccatttggtaagattccc

SEQ ID NO: 40428 - DNA, 33 bp, Homo sapiens
tcctccttctacgtaaagtatcccatgcttcta

SEQ ID NO: 40429 - DNA, 33 bp, Homo sapiens
gtagcagatgaaaatgcagacttcaagggccat

SEQ ID NO: 40430 - DNA, 51 bp, Homo sapiens
tttctttctctttttttgtggtcttcagtaagttgtatgttgtaagtactt

SEQ ID NO: 40431 - DNA, 51 bp, Homo sapiens
tatatatggcagaataaatggttacgaagtttgagaatatgtgaattttaa

SEQ ID NO: 40432 - DNA, 33 bp, Homo sapiens
tatgcatcattgattaaaagagaaattagcaag

SEQ ID NO: 40433 - DNA, 33 bp, Homo sapiens
agcttatggagtattacgtgtgtagtatagacc

SEQ ID NO: 40434 - DNA, 33 bp, Homo sapiens
tgtgataagtggtccacgaaactatcagactcc

SEQ ID NO: 40435 - DNA, 51 bp, Homo sapiens
gtgagttttcaatttatgaagccaacaggttaaggccattttcagcagttg

SEQ ID NO: 40436 - DNA, 33 bp, Homo sapiens
gttgttaagcattggccgatgaaataaaacaag

SEQ ID NO: 40437 - DNA, 33 bp, Homo sapiens
tactttcttcatgccaaaatcgaagatgccatg

SEQ ID NO: 40438 - DNA, 33 bp, Homo sapiens
catttgaggtctgttacaaataccacaacacat

SEQ ID NO: 40439 - DNA, 33 bp, Homo sapiens
aagtgtaggcttatcaaaccttaaagcatctga

SEQ ID NO: 40440 - DNA, 33 bp, Homo sapiens
aagatgactaatgaagaaattagaagcactgag

SEQ ID NO: 40441 - DNA, 33 bp, Homo sapiens
gtcctaagagatcagacagctttctgcaattaa

SEQ ID NO: 40442 - DNA, 33 bp, Homo sapiens
aagaacctaagaattcacccctgatattgcaaa

SEQ ID NO: 40443 - DNA, 33 bp, Homo sapiens
aatctggaagacttcaataagttgtaaagattt

SEQ ID NO: 40444 - DNA, 33 bp, Homo sapiens
ctgaagcccagaaagacgtgcaattacccaaga

SEQ ID NO: 40445 - DNA, 33 bp, Homo sapiens
aggagagagaagaatgcaatcaaacttacagac

SEQ ID NO: 40446 - DNA, 33 bp, Homo sapiens
gactgcaagaaatttacggtatagcgtcactag

SEQ ID NO: 40447 - DNA, 33 bp, Homo sapiens
attgtatcacttaacaatagagcctaaacagta

SEQ ID NO: 40448 - DNA, 33 bp, Homo sapiens
gtaattacttaagggaatagaaatgtttttgag

SEQ ID NO: 40449 - DNA, 33 bp, Homo sapiens
tatgctctttgccgtcaaactgctaaatattgt

SEQ ID NO: 40450 - DNA, 33 bp, Homo sapiens
ttccaatttggtaacacgaagggaacagtggtt

SEQ ID NO: 40451 - DNA, 33 bp, Homo sapiens
agcattaaatgagatactacactatgacagagt

SEQ ID NO: 40452 - DNA, 33 bp, Homo sapiens
cagtacagccttgctaagaagcccacaaaagca

SEQ ID NO: 40453 - DNA, 33 bp, Homo sapiens
gaggcatgaaaatacactggaaagcaggctcat

SEQ ID NO: 40454 - DNA, 51 bp, Homo sapiens
atcaaacactatgtataatttcaaactgtagcattaataggagatacttca

SEQ ID NO: 40455 - DNA, 33 bp, Homo sapiens
gtgatggcagtccatgaataatttgcacttgtt

SEQ ID NO: 40456 - DNA, 33 bp, Homo sapiens
gaaagcaatcacagacaatatataggtgaatat

SEQ ID NO: 40457 - DNA, 33 bp, Homo sapiens
acaagtgactaagttaaagagagttatgaataa

SEQ ID NO: 40458 - DNA, 33 bp, Homo sapiens
ggagagcactcaggtaacaacacaatagatctg

SEQ ID NO: 40459 - DNA, 33 bp, Homo sapiens
ctaattatccagcttggaagagtccctgacatc

SEQ ID NO: 40460 - DNA, 33 bp, Homo sapiens
cttgatctaaacaggaagttcagtcaatcacta

SEQ ID NO: 40461 - DNA, 33 bp, Homo sapiens
cttgagaatttccaagactaggtaagagcaaca

SEQ ID NO: 40462 - DNA, 33 bp, Homo sapiens
tcaacatgaggacaataaagttgaagaccttta

SEQ ID NO: 40463 - DNA, 33 bp, Homo sapiens
gcatattggtaggcaacgggtatttctacaatg

SEQ ID NO: 40464 - DNA, 33 bp, Homo sapiens
gatctgtaacctggacaactaaaacatggtttc

SEQ ID NO: 40465 - DNA, 33 bp, Homo sapiens
acaaaagacagcaaacaagtggaacaacttgct

SEQ ID NO: 40466 - DNA, 33 bp, Homo sapiens
ggatagaagacattacagggtagactcacattt

SEQ ID NO: 40467 - DNA, 33 bp, Homo sapiens
cctcattatcttgactcaaacctgtctctgtcc

SEQ ID NO: 40468 - DNA, 33 bp, Homo sapiens
aagaacaagttcctccgcgctcacatatgtagt

SEQ ID NO: 40469 - DNA, 33 bp, Homo sapiens
tgttacctctcatcaaattcgacttaatgttat

SEQ ID NO: 40470 - DNA, 33 bp, Homo sapiens
aacaaacaaaaccactgaccaaattgatgcata

SEQ ID NO: 40471 - DNA, 33 bp, Homo sapiens
agggaggacaccgaggaatatatgatgcagatt

SEQ ID NO: 40472 - DNA, 33 bp, Homo sapiens
ccattcataaatgtaacgccagggagtgccaca

SEQ ID NO: 40473 - DNA, 33 bp, Homo sapiens
gagtgccacagctatgaataaaagtcaagcagg

SEQ ID NO: 40474 - DNA, 33 bp, Homo sapiens
cttcctattctgaccacccagttatgctgtgat

SEQ ID NO: 40475 - DNA, 33 bp, Homo sapiens
ctgttggtcattcagtaaatatttatggagcac

SEQ ID NO: 40476 - DNA, 33 bp, Homo sapiens
cttttacactagaaaacctcacaaagtagtcaa

SEQ ID NO: 40477 - DNA, 33 bp, Homo sapiens
tttgatcacttcttaccaattctactgctgatt

SEQ ID NO: 40478 - DNA, 33 bp, Homo sapiens
acttccaggttctaaaatgtaatggttaaaaga

SEQ ID NO: 40479 - DNA, 33 bp, Homo sapiens
cagaaaaatgaatgaccaatgtgaaaggtaaag

SEQ ID NO: 40480 - DNA, 33 bp, Homo sapiens
ctacataaacttggagaaaggacaagactatca

SEQ ID NO: 40481 - DNA, 33 bp, Homo sapiens
aaagtaggcaagaaaacgagttgtagataatat

SEQ ID NO: 40482 - DNA, 33 bp, Homo sapiens
tcacctcctcattttacagttaaaaatactgag

SEQ ID NO: 40483 - DNA, 33 bp, Homo sapiens
aatcctgccaaaaaaaacaattgtgagcatgtc

SEQ ID NO: 40484 - DNA, 33 bp, Homo sapiens
gtttgaccaaacaaccaagcaccataatctagc

SEQ ID NO: 40485 - DNA, 33 bp, Homo sapiens
tattttgcgatacaaacttaatcacttaggtgt

SEQ ID NO: 40486 - DNA, 33 bp, Homo sapiens
tgtcattttaatagtcaccaaggaagaaaaaat

SEQ ID NO: 40487 - DNA, 33 bp, Homo sapiens
catatttcaataggttaaaacagtcgaccagat

SEQ ID NO: 40488 - DNA, 33 bp, Homo sapiens
aaggacttgagcccaaatgtccctgcaaatcct

SEQ ID NO: 40489 - DNA, 33 bp, Homo sapiens
atcttgctccacattcacagttgtaagtgcctt

SEQ ID NO: 40490 - DNA, 33 bp, Homo sapiens
cattaaaatatctcacaaaaaggttcttaattc

SEQ ID NO: 40491 - DNA, 33 bp, Homo sapiens
catatccacatatactaacacaaatggatgttt

SEQ ID NO: 40492 - DNA, 33 bp, Homo sapiens
ataaagtcgatcaacacacaccattttatttcc

SEQ ID NO: 40493 - DNA, 33 bp, Homo sapiens
tgcctaggtttaagcacagttctatcttgaaca

SEQ ID NO: 40494 - DNA, 33 bp, Homo sapiens
actcaggagctaggaaaggtattctgatactgc

SEQ ID NO: 40495 - DNA, 33 bp, Homo sapiens
ccctaagctgactttacagattcttcatttgtt

SEQ ID NO: 40496 - DNA, 33 bp, Homo sapiens
tggatgttcttaatcacctacaaggaatccatg

SEQ ID NO: 40497 - DNA, 33 bp, Homo sapiens
gttataacctctggggacactcaccgttagcca

SEQ ID NO: 40498 - DNA, 51 bp, Homo sapiens
taatctcctctcatgtggtaagttacgatagaattatttaaaaaattgctg

SEQ ID NO: 40499 - DNA, 33 bp, Homo sapiens
ccctagcataacacacagcagcgcaaccctaat

SEQ ID NO: 40500 - DNA, 33 bp, Homo sapiens
ggtacccacgttgtagcactgttgttaagatta

SEQ ID NO: 40501 - DNA, 33 bp, Homo sapiens
tcagtcctcactggacaccccgcatctatacct

SEQ ID NO: 40502 - DNA, 33 bp, Homo sapiens
gcagccttgaggaaagaagtcacaactcaaaga

SEQ ID NO: 40503 - DNA, 33 bp, Homo sapiens
tcctttgatgcaaccaccagtgccaagctttga

SEQ ID NO: 40504 - DNA, 51 bp, Homo sapiens
gctggcaacgtcttccatcttttcacaagcagaacacaggcatcgcagatg

SEQ ID NO: 40505 - DNA, 51 bp, Homo sapiens
atggcctttataaataatcccactacgtatcttctttttcagtctgtgaga

SEQ ID NO: 40506 - DNA, 51 bp, Homo sapiens
tatagtcattttagttcaaagtctgaaattaaaactgcaaagtaatttcct

SEQ ID NO: 40507 - DNA, 33 bp, Homo sapiens
cacatgaaccaagtccacagagagtcatcagtg

SEQ ID NO: 40508 - DNA, 33 bp, Homo sapiens
gaggatttgattttcagcagtctttatgagacc

SEQ ID NO: 40509 - DNA, 33 bp, Homo sapiens
aaacatgataatacaccgctttatacagacata

SEQ ID NO: 40510 - DNA, 33 bp, Homo sapiens
aaaacaagttactgaaagcgagatctacttaaa

SEQ ID NO: 40511 - DNA, 33 bp, Homo sapiens
tctgcgaattaagaaccgctacattagaggagc

SEQ ID NO: 40512 - DNA, 33 bp, Homo sapiens
tgatgattagagcaaaattgtcagttaaaaaat

SEQ ID NO: 40513 - DNA, 33 bp, Homo sapiens
gtgtgaaatcaactgcaaatcagttatgtgttt

SEQ ID NO: 40514 - DNA, 33 bp, Homo sapiens
ttttgcaccttcctcactaaattgggtccttaa

SEQ ID NO: 40515 - DNA, 33 bp, Homo sapiens
gtttgtgagagtaatcaacattgacacttatag

SEQ ID NO: 40516 - DNA, 51 bp, Homo sapiens
catagctcgtttatatcaataatgcagattaaaatatttgctaatgaactc

SEQ ID NO: 40517 - DNA, 51 bp, Homo sapiens
attggggatagaaggagatagactcaacaggcttaccacctggatgtgagg

SEQ ID NO: 40518 - DNA, 33 bp, Homo sapiens
tgttagaatgggggtactaaactaagaagtaat

SEQ ID NO: 40519 - DNA, 33 bp, Homo sapiens
tacagtatagggtcaaattctgtagccagctgg

SEQ ID NO: 40520 - DNA, 51 bp, Homo sapiens
tgtgtttcctgatagaagcatttctacattaaacatgaggacttccaaggt

SEQ ID NO: 40521 - DNA, 33 bp, Homo sapiens
ctccagtgattccacacgttcactcaatcacta

SEQ ID NO: 40522 - DNA, 51 bp, Homo sapiens
gccatcttactaaggtaatcagaataagaaaaaactgaaaattgatgtcat

SEQ ID NO: 40523 - DNA, 33 bp, Homo sapiens
acctcctgctatcatgaaagacaaattatattt

SEQ ID NO: 40524 - DNA, 33 bp, Homo sapiens
caactgaacgttacaccgcaatcctgggcttgg

SEQ ID NO: 40525 - DNA, 33 bp, Homo sapiens
cccctggtccttagtacagcagacgagtcccct

SEQ ID NO: 40526 - DNA, 51 bp, Homo sapiens
attgaaaataaagaagttgtatgaacgaatgccatcatattttttcctcct

SEQ ID NO: 40527 - DNA, 51 bp, Homo sapiens
tgatgggacctaaaagtttactctgaaaatgtacgttaaagcccataaata

SEQ ID NO: 40528 - DNA, 33 bp, Homo sapiens
gtagagaacatggcaaatgtcacatagacttta

SEQ ID NO: 40529 - DNA, 51 bp, Homo sapiens
aactgtttttccctatcttcaacaacgtcgttctctgcttcccatgtgtga

SEQ ID NO: 40530 - DNA, 33 bp, Homo sapiens
acctccaaagagtccactgattactgatttgtt

SEQ ID NO: 40531 - DNA, 33 bp, Homo sapiens
atatcaagtgtttatacggaaaggatagcaata

SEQ ID NO: 40532 - DNA, 33 bp, Homo sapiens
tatactttaagactcacgttctcaaacttcaga

SEQ ID NO: 40533 - DNA, 33 bp, Homo sapiens
atagtaagctcctacaactttatgatgtttagt

SEQ ID NO: 40534 - DNA, 33 bp, Homo sapiens
accagagctttgttaaatacaacctagactatg

SEQ ID NO: 40535 - DNA, 33 bp, Homo sapiens
acagagataaaaaatacgtggttcctgtctcca

SEQ ID NO: 40536 - DNA, 33 bp, Homo sapiens
tgattttggtttcatacgagctactgttgcaat

SEQ ID NO: 40537 - DNA, 33 bp, Homo sapiens
tttataaaatcagtaaaaggaaagctccaaaac

SEQ ID NO: 40538 - DNA, 33 bp, Homo sapiens
gttgataatactttgccgaacttattccctggg

SEQ ID NO: 40539 - DNA, 33 bp, Homo sapiens
accttcaaagactgcacccttttcgatcttgga

SEQ ID NO: 40540 - DNA, 33 bp, Homo sapiens
atgtgtcttctctgtaccttccactgtttacat

SEQ ID NO: 40541 - DNA, 33 bp, Homo sapiens
agtcctagctggtgaaaatgactccctttggaa

SEQ ID NO: 40542 - DNA, 33 bp, Homo sapiens
tgcattaagaagcaaaggttcaaagccttgaaa

SEQ ID NO: 40543 - DNA, 51 bp, Homo sapiens
ttattccacttgattttcaaaacaacttaatgatgtaggtattgttattct

SEQ ID NO: 40544 - DNA, 33 bp, Homo sapiens
gaataaaattcagaataacggatttggtggtgc

SEQ ID NO: 40545 - DNA, 33 bp, Homo sapiens
aaggaggctaataaaaacacacatagtattgag

SEQ ID NO: 40546 - DNA, 33 bp, Homo sapiens
tgtcttgtagtatgacaccaaattgtagctaat

SEQ ID NO: 40547 - DNA, 33 bp, Homo sapiens
tcccagagttttgggaaaagataatgtttcttt

SEQ ID NO: 40548 - DNA, 33 bp, Homo sapiens
ctatgctgactgatacagagccctaacagggga

SEQ ID NO: 40549 - DNA, 51 bp, Homo sapiens
tgtttcaggatagccaaattggataagtagtaaggacaagtgtttttttag

SEQ ID NO: 40550 - DNA, 33 bp, Homo sapiens
gagaatattcttgctcaagaggaatgttgcata

SEQ ID NO: 40551 - DNA, 33 bp, Homo sapiens
ggtaacagaattcagaagaaagacatcaaatgc

SEQ ID NO: 40552 - DNA, 51 bp, Homo sapiens
caatgatgatgagcttttcttcataagattgttggccgcatagatgtcttc

SEQ ID NO: 40553 - DNA, 33 bp, Homo sapiens
ccatacttaacctaaacagccaacagaggtcaa

SEQ ID NO: 40554 - DNA, 33 bp, Homo sapiens
cagatatatgtctagaaatggactgcctaaact

SEQ ID NO: 40555 - DNA, 33 bp, Homo sapiens
tcactctagtttgtcaatatccctttgaaagtg

SEQ ID NO: 40556 - DNA, 33 bp, Homo sapiens
gtctttaagtactttacaccttgtaatgcatat

SEQ ID NO: 40557 - DNA, 33 bp, Homo sapiens
agctcatggtccaagacggctgctccagttcta

SEQ ID NO: 40558 - DNA, 33 bp, Homo sapiens
cacctcctacctcataagcagaccgtcgaaatc

SEQ ID NO: 40559 - DNA, 33 bp, Homo sapiens
aaaacaacagcaccaaataagatgagttgacag

SEQ ID NO: 40560 - DNA, 33 bp, Homo sapiens
agaccagacgaattccgagtgtgtggcttggta

SEQ ID NO: 40561 - DNA, 33 bp, Homo sapiens
gaactactctaaacagaagattgacaaggtttt

SEQ ID NO: 40562 - DNA, 33 bp, Homo sapiens
agggcttaaagtacaaactctctctgacagatg

SEQ ID NO: 40563 - DNA, 33 bp, Homo sapiens
tggaggcaggacagggacagactggagctggat

SEQ ID NO: 40564 - DNA, 33 bp, Homo sapiens
agaacatgtattcaccaatttggaccaggttta

SEQ ID NO: 40565 - DNA, 33 bp, Homo sapiens
ttagaatcgattttaactggtattagccagtgg

SEQ ID NO: 40566 - DNA, 33 bp, Homo sapiens
aacactatgcaatttacaacacctttccacata

SEQ ID NO: 40567 - DNA, 33 bp, Homo sapiens
tcacaaccactttggaacccatcggagagcctc

SEQ ID NO: 40568 - DNA, 33 bp, Homo sapiens
aggtaattcagcaagacctaaaggcaccttcct

SEQ ID NO: 40569 - DNA, 33 bp, Homo sapiens
gctggagtgatgataaacttatggagaagtggt

SEQ ID NO: 40570 - DNA, 51 bp, Homo sapiens
atagaccccaacacgacgagcattccctattcgatttttccatcttctgtg

SEQ ID NO: 40571 - DNA, 33 bp, Homo sapiens
actgattaacgtgaaacgggcatccaaatggta

SEQ ID NO: 40572 - DNA, 33 bp, Homo sapiens
atttgttattgaaagagaatttgaagtgtggtt

SEQ ID NO: 40573 - DNA, 33 bp, Homo sapiens
cttgtcaaacatattcacataaacgcttctcat

SEQ ID NO: 40574 - DNA, 33 bp, Homo sapiens
tctgagagtgaaaagacggagctgaaacttaag

SEQ ID NO: 40575 - DNA, 33 bp, Homo sapiens
atcagtatcatttttgcattatcttctataaat

SEQ ID NO: 40576 - DNA, 33 bp, Homo sapiens
tatgtggagcactatgaaaagagaaaggagata

SEQ ID NO: 40577 - DNA, 33 bp, Homo sapiens
cattttgagacagttacggttggaaaattttct

SEQ ID NO: 40578 - DNA, 33 bp, Homo sapiens
agttacaattgtgcaacagaggaccgagagaca

SEQ ID NO: 40579 - DNA, 33 bp, Homo sapiens
ggcctactagagcaagacaggctttctcagtcc

SEQ ID NO: 40580 - DNA, 33 bp, Homo sapiens
attaacattatgttcaaccaatcacttttgaga

SEQ ID NO: 40581 - DNA, 33 bp, Homo sapiens
gcaggcaagtttgctacggctgtttcatttctg

SEQ ID NO: 40582 - DNA, 33 bp, Homo sapiens
cctttcttcgcttatcaatctcctagcatgcag

SEQ ID NO: 40583 - DNA, 33 bp, Homo sapiens
ttgcatatattatccaagtttagagatgggaaa

SEQ ID NO: 40584 - DNA, 33 bp, Homo sapiens
ctctggtgagttccaacagtcctacagggtttc

SEQ ID NO: 40585 - DNA, 33 bp, Homo sapiens
ctcttgataatctacactcgattgctacatttt

SEQ ID NO: 40586 - DNA, 33 bp, Homo sapiens
agacttggcattagtaagtttctgttcaagttc

SEQ ID NO: 40587 - DNA, 51 bp, Homo sapiens
tagatgcttttactggtccctttcagtcctaaaattatatgattctaaaca

SEQ ID NO: 40588 - DNA, 33 bp, Homo sapiens
tactcccagaggttgagcgataggtgaatggtc

SEQ ID NO: 40589 - DNA, 33 bp, Homo sapiens
tgtttgatattcaagacggtatttgtcatttgg

SEQ ID NO: 40590 - DNA, 33 bp, Homo sapiens
gttttgcttttacttcactggttgctaccactt

SEQ ID NO: 40591 - DNA, 33 bp, Homo sapiens
acaggaggcacacaaagtcctattggattgtgg

SEQ ID NO: 40592 - DNA, 51 bp, Homo sapiens
ttctcttgagtgaagattcccataaatgttgctttgtaaatgtgtccaggg

SEQ ID NO: 40593 - DNA, 33 bp, Homo sapiens
ggaaactgagaggcagaaaagaattgtccgtgc

SEQ ID NO: 40594 - DNA, 33 bp, Homo sapiens
tatttaagcacttaagaaatctcaggcatttta

SEQ ID NO: 40595 - DNA, 33 bp, Homo sapiens
ctctgtgtaaatacaaacgtaactggcttctaa

SEQ ID NO: 40596 - DNA, 33 bp, Homo sapiens
cgttcctagaagagacagagagcgctgactgaa

SEQ ID NO: 40597 - DNA, 33 bp, Homo sapiens
cctttgttccgcacaccgagccagtaatatatt

SEQ ID NO: 40598 - DNA, 33 bp, Homo sapiens
agtcatccaattcctacgctgggtttgacctac

SEQ ID NO: 40599 - DNA, 33 bp, Homo sapiens
ctctttgctgagctaccgtaaacatacaccatg

SEQ ID NO: 40600 - DNA, 33 bp, Homo sapiens
ctccctctgtctttggaactaagaatggatctt

SEQ ID NO: 40601 - DNA, 33 bp, Homo sapiens
tggaggtagtttgttaagctgcatatgcacaat

SEQ ID NO: 40602 - DNA, 33 bp, Homo sapiens
agttccttccatcaacagtctatttgcccatcc

SEQ ID NO: 40603 - DNA, 33 bp, Homo sapiens
tgcccttctggaactcacagtataaccatatgt

SEQ ID NO: 40604 - DNA, 33 bp, Homo sapiens
gttgctcaatatgtgaagcaacattttaaaaca

SEQ ID NO: 40605 - DNA, 33 bp, Homo sapiens
attccagcctctgcaacttcgtcccgcagtttt

SEQ ID NO: 40606 - DNA, 33 bp, Homo sapiens
acaggtctaaagtgctaagaattatcctgcaca

SEQ ID NO: 40607 - DNA, 33 bp, Homo sapiens
gttctgtcattggacaagaaatttagtcaaaag

SEQ ID NO: 40608 - DNA, 33 bp, Homo sapiens
ttggccacttaagcaacggtcagaagtccaggc

SEQ ID NO: 40609 - DNA, 33 bp, Homo sapiens
ccagcatattctatccacaacatttctcagtag

SEQ ID NO: 40610 - DNA, 33 bp, Homo sapiens
cagtgacagatttaacagattaaaatttcctgt

SEQ ID NO: 40611 - DNA, 33 bp, Homo sapiens
ccccccagaggtatgaccacagctacaactaag

SEQ ID NO: 40612 - DNA, 33 bp, Homo sapiens
cacagggttgctaaataaaaaagacaggattct

SEQ ID NO: 40613 - DNA, 33 bp, Homo sapiens
ttccaatcttgtacacaggggaaagatgaagaa

SEQ ID NO: 40614 - DNA, 33 bp, Homo sapiens
cctaactaatacaacaactaaatcatcttatgt

SEQ ID NO: 40615 - DNA, 33 bp, Homo sapiens
cagaccccaaaagccaccatattataggattcc

SEQ ID NO: 40616 - DNA, 51 bp, Homo sapiens
ggctcacctgtgccttgaacattcaatgaagaagctgaaccaacacaggtt

SEQ ID NO: 40617 - DNA, 33 bp, Homo sapiens
gtgatatctgcttgctaaaaaggatctggtgat

SEQ ID NO: 40618 - DNA, 33 bp, Homo sapiens
tgtgaagttttctggggagagcacccaaggcca

SEQ ID NO: 40619 - DNA, 33 bp, Homo sapiens
ctatttatttaaccaaaccctattgtgagatgt

SEQ ID NO: 40620 - DNA, 33 bp, Homo sapiens
atggggaagtcttgggaagataactcaatgccc

SEQ ID NO: 40621 - DNA, 33 bp, Homo sapiens
agaaagtagtcagatacgctaagttctcagcca

SEQ ID NO: 40622 - DNA, 33 bp, Homo sapiens
atttgtcagttgatgaaaatctgagtggtttct

SEQ ID NO: 40623 - DNA, 33 bp, Homo sapiens
ctgtgttcatatgaaacgtccatgataggccaa

SEQ ID NO: 40624 - DNA, 33 bp, Homo sapiens
ttagccagtttgtcctcaacattgagctccgtg

SEQ ID NO: 40625 - DNA, 33 bp, Homo sapiens
ggtggacacatacgtaaaaattcactgggctat

SEQ ID NO: 40626 - DNA, 33 bp, Homo sapiens
ctatgcatatttatacaacagctcatcaggatt

SEQ ID NO: 40627 - DNA, 33 bp, Homo sapiens
gagggaaccagaggggccacctaacgtccgtgt

SEQ ID NO: 40628 - DNA, 33 bp, Homo sapiens
ctactgggacctagacaatgtgagatcatctgt

SEQ ID NO: 40629 - DNA, 33 bp, Homo sapiens
cacaggggaaatcaccacactataattctgtgt

SEQ ID NO: 40630 - DNA, 33 bp, Homo sapiens
tttctgctgccacgtcaagggtttatttttgag

SEQ ID NO: 40631 - DNA, 33 bp, Homo sapiens
cataggtacctgataaacatcatcacatttagt

SEQ ID NO: 40632 - DNA, 33 bp, Homo sapiens
gctccatgagcgtagacatcttgcccgtcctgt

SEQ ID NO: 40633 - DNA, 51 bp, Homo sapiens
agaaaaaacattgataaggtccataactgaatggaaggaacaaaatacaaa

SEQ ID NO: 40634 - DNA, 33 bp, Homo sapiens
ccgaagggccttttaaatctaaggagctttgtc

SEQ ID NO: 40635 - DNA, 33 bp, Homo sapiens
tcatggctgtgataacggtcattattttgttcc

SEQ ID NO: 40636 - DNA, 33 bp, Homo sapiens
gatttcagacttaacaacttctagaattgtgag

SEQ ID NO: 40637 - DNA, 33 bp, Homo sapiens
aggaaaaactagcccacagccagagatggtacc

SEQ ID NO: 40638 - DNA, 33 bp, Homo sapiens
atgaaagtcctagagacgtgtgtaccttacagt

SEQ ID NO: 40639 - DNA, 33 bp, Homo sapiens
aatacagccgtggcaccgatctcagaggcataa

SEQ ID NO: 40640 - DNA, 33 bp, Homo sapiens
ctcgtgtgccatccatcaagtgcaagatggctg

SEQ ID NO: 40641 - DNA, 33 bp, Homo sapiens
gggaaagtggacctcaacttacccaacattggt

SEQ ID NO: 40642 - DNA, 33 bp, Homo sapiens
acagctgttccatctcaattacaaagctctgaa

SEQ ID NO: 40643 - DNA, 33 bp, Homo sapiens
cgcccagcctgagctacgttttagatgtgcatt

SEQ ID NO: 40644 - DNA, 33 bp, Homo sapiens
actcctcccataaaacacttctccaaatttctg

SEQ ID NO: 40645 - DNA, 33 bp, Homo sapiens
ggccaactctgaggacagcactccaaagggtgg

SEQ ID NO: 40646 - DNA, 33 bp, Homo sapiens
gtgccccgtgcagtgacagccgctttcctgcag

SEQ ID NO: 40647 - DNA, 33 bp, Homo sapiens
aaatgtgcttgacagacatttcaagtacaaaaa

SEQ ID NO: 40648 - DNA, 33 bp, Homo sapiens
gctttcttttcatttacctaatttcatcaattg

SEQ ID NO: 40649 - DNA, 33 bp, Homo sapiens
caggcagagaagaaaaattggaggttgggggcg

SEQ ID NO: 40650 - DNA, 33 bp, Homo sapiens
tacaaggcacaggacgaccctgcaatgagaaat

SEQ ID NO: 40651 - DNA, 33 bp, Homo sapiens
gacctcttgattaagtgacaccattattatgaa

SEQ ID NO: 40652 - DNA, 33 bp, Homo sapiens
tgcagggttgttgagaagaaccaatgagttaat

SEQ ID NO: 40653 - DNA, 33 bp, Homo sapiens
acttggcacccattcaatcatacatgtctcaga

SEQ ID NO: 40654 - DNA, 33 bp, Homo sapiens
tttcatgcaaaccacacgacctggtctaagcct

SEQ ID NO: 40655 - DNA, 33 bp, Homo sapiens
aatcagtgcttctttcaaacttaaatgattctc

SEQ ID NO: 40656 - DNA, 33 bp, Homo sapiens
ggcatccaggcttgtaccttgacagtctgactc

SEQ ID NO: 40657 - DNA, 33 bp, Homo sapiens
tcacagccaggtcaccagaaacttcccacagat

SEQ ID NO: 40658 - DNA, 33 bp, Homo sapiens
gtggggaagggattcacggtctcaccttcgcat

SEQ ID NO: 40659 - DNA, 33 bp, Homo sapiens
cttacctaactgcccaatctaagattccctgta

SEQ ID NO: 40660 - DNA, 33 bp, Homo sapiens
tatatgcttaaacttccagtccaccttgaatat

SEQ ID NO: 40661 - DNA, 33 bp, Homo sapiens
cctgctttttcacgtcaagggagtgctttgctc

SEQ ID NO: 40662 - DNA, 33 bp, Homo sapiens
gaaggccatgttgtaaactactgaatagaacat

SEQ ID NO: 40663 - DNA, 33 bp, Homo sapiens
aggacttgacccttccaacagtatctctctacc

SEQ ID NO: 40664 - DNA, 33 bp, Homo sapiens
cagatcaagaaccaacagcccatgtgttacttt

SEQ ID NO: 40665 - DNA, 33 bp, Homo sapiens
cggtgtctcacacaaaacctcagtggtggttat

SEQ ID NO: 40666 - DNA, 33 bp, Homo sapiens
tcaccttatagtatcacaatcagaagttttgct

SEQ ID NO: 40667 - DNA, 33 bp, Homo sapiens
ctctacattgcttgataactctgagcttcattt

SEQ ID NO: 40668 - DNA, 33 bp, Homo sapiens
tccatccaggaaagacagtagcacctgaaaatc

SEQ ID NO: 40669 - DNA, 33 bp, Homo sapiens
gttgcaaagattaaaccagtgattcttaacccc

SEQ ID NO: 40670 - DNA, 33 bp, Homo sapiens
ctatctgtttcatttacgtattgttgcataacc

SEQ ID NO: 40671 - DNA, 33 bp, Homo sapiens
gtgatggagcccccaacagttgcctgagtcttg

SEQ ID NO: 40672 - DNA, 33 bp, Homo sapiens
ggttaagagaaagtataagttaacacgggtgag

SEQ ID NO: 40673 - DNA, 33 bp, Homo sapiens
aagatggcaacagagacagtctacttgcaagac

SEQ ID NO: 40674 - DNA, 33 bp, Homo sapiens
caggacctctataccacctaagaaacattctta

SEQ ID NO: 40675 - DNA, 33 bp, Homo sapiens
cattatatctggcacccgccttcatctgtagcc

SEQ ID NO: 40676 - DNA, 33 bp, Homo sapiens
atcaggcatttactatcagctagattttgtgct

SEQ ID NO: 40677 - DNA, 33 bp, Homo sapiens
gatgcttgcacccagtcaaccatcagtacccag

SEQ ID NO: 40678 - DNA, 33 bp, Homo sapiens
tcccagtttagaggaaattactctgctacaccc

SEQ ID NO: 40679 - DNA, 33 bp, Homo sapiens
ggtgctctatccaggagtcagcacaatattaca

SEQ ID NO: 40680 - DNA, 33 bp, Homo sapiens
tggagtaaagtctaaggatcttaccccagaatt

SEQ ID NO: 40681 - DNA, 33 bp, Homo sapiens
ttcttgatcgtccttcacctgacatcatggtaa

SEQ ID NO: 40682 - DNA, 33 bp, Homo sapiens
ctgctcctgcaaccacgactaaaaccctggctt

SEQ ID NO: 40683 - DNA, 33 bp, Homo sapiens
agcggttgcccttgacactcaactctcactagg

SEQ ID NO: 40684 - DNA, 33 bp, Homo sapiens
caaataaggccgatgacaggaggtaagaggtca

SEQ ID NO: 40685 - DNA, 33 bp, Homo sapiens
acattatcagttgaaaaaatccgctctaggata

SEQ ID NO: 40686 - DNA, 33 bp, Homo sapiens
catctgttggttttcaatatccgttcacccttc

SEQ ID NO: 40687 - DNA, 33 bp, Homo sapiens
accacggaaaccgatcaaaaagtatcagccatg

SEQ ID NO: 40688 - DNA, 33 bp, Homo sapiens
gtatcagccatgatgaagaatgtagaacactcg

SEQ ID NO: 40689 - DNA, 33 bp, Homo sapiens
aacccagtgagcatttcaaaaccctgtaagtct

SEQ ID NO: 40690 - DNA, 33 bp, Homo sapiens
gtcttggtcaaacttacctcctctgccctgtat

SEQ ID NO: 40691 - DNA, 33 bp, Homo sapiens
tccctcttattcactgaacctgatggtagtttt

SEQ ID NO: 40692 - DNA, 33 bp, Homo sapiens
atttgaataacgagaaagaggcagagaccagca

SEQ ID NO: 40693 - DNA, 33 bp, Homo sapiens
ctaagtgtggttcatgcacaggtaatatcagcg

SEQ ID NO: 40694 - DNA, 33 bp, Homo sapiens
tggcatttctgaacataaggtgctgaagtgaag

SEQ ID NO: 40695 - DNA, 33 bp, Homo sapiens
gcatccgtaggcgtcacgctctttctccaaggc

SEQ ID NO: 40696 - DNA, 33 bp, Homo sapiens
atcaacttgattgacaactcagtgtaaagtggt

SEQ ID NO: 40697 - DNA, 33 bp, Homo sapiens
gatcattgcaaggaaaagtagaagtactagata

SEQ ID NO: 40698 - DNA, 33 bp, Homo sapiens
gtggtagcttccaggaatcaagagtcaagatga

SEQ ID NO: 40699 - DNA, 33 bp, Homo sapiens
gaaactggacatgtacagaaggggctgcccgat

SEQ ID NO: 40700 - DNA, 33 bp, Homo sapiens
atacaagccacaatacggatgaatctcaaaaac

SEQ ID NO: 40701 - DNA, 33 bp, Homo sapiens
tgcatcactatcagtaaagttaagcctgtgtcg

SEQ ID NO: 40702 - DNA, 33 bp, Homo sapiens
ttaattttagtaactaccatgtcctgaaggtta

SEQ ID NO: 40703 - DNA, 33 bp, Homo sapiens
aatcttcagtgggatacgatgggctataaagaa

SEQ ID NO: 40704 - DNA, 33 bp, Homo sapiens
agattacaacaaaacaaggataaatgcacttcc

SEQ ID NO: 40705 - DNA, 33 bp, Homo sapiens
tgattgatggtagagacggggtcttgatgtgtg

SEQ ID NO: 40706 - DNA, 33 bp, Homo sapiens
taaaatgccagtctcacaaggttgttgtttaag

SEQ ID NO: 40707 - DNA, 33 bp, Homo sapiens
tagtggttgccttggaaattacaagtaacatct

SEQ ID NO: 40708 - DNA, 33 bp, Homo sapiens
gaaacaccggcattagcagattgcagagttcta

SEQ ID NO: 40709 - DNA, 33 bp, Homo sapiens
gggctctctggaacaaatggtgtccctcctgac

SEQ ID NO: 40710 - DNA, 33 bp, Homo sapiens
agcccagtccctttacaccgcagacattcagct

SEQ ID NO: 40711 - DNA, 33 bp, Homo sapiens
aaaaggaaatccatcaatagtgtctactaacat

SEQ ID NO: 40712 - DNA, 33 bp, Homo sapiens
ggccatgagaaaagaaaacagacagggacaaca

SEQ ID NO: 40713 - DNA, 51 bp, Homo sapiens
aaaactgtcttaaaagaaaatctatcccatgctctatctttcagagaccta

SEQ ID NO: 40714 - DNA, 33 bp, Homo sapiens
ggtacaaggatgaacacgtcattgaacaattac

SEQ ID NO: 40715 - DNA, 33 bp, Homo sapiens
agagtcagggttcaaagataggcgtgtctgacc

SEQ ID NO: 40716 - DNA, 33 bp, Homo sapiens
accagataatctgacaataatcagtgtgttagt

SEQ ID NO: 40717 - DNA, 33 bp, Homo sapiens
ttcattctctcttttaagcaaatgtcatggtta

SEQ ID NO: 40718 - DNA, 33 bp, Homo sapiens
ctcctcagccgcaccacccttccttgtcactca

SEQ ID NO: 40719 - DNA, 33 bp, Homo sapiens
gaggaaaatagaggaaaacttgctaagcatgag

SEQ ID NO: 40720 - DNA, 33 bp, Homo sapiens
gctgagacttgaatgacaagaaagcatcagaca

SEQ ID NO: 40721 - DNA, 33 bp, Homo sapiens
tgcttgtcccaccggcgagagctcttctgtcag

SEQ ID NO: 40722 - DNA, 33 bp, Homo sapiens
gatgttaccctcttaaaagatcaaagccaactt

SEQ ID NO: 40723 - DNA, 33 bp, Homo sapiens
tactatctctaaatacaaacacagatgtttaca

SEQ ID NO: 40724 - DNA, 33 bp, Homo sapiens
gtccggagtcctaacaagaaggcatagcaataa

SEQ ID NO: 40725 - DNA, 33 bp, Homo sapiens
cttccaccaggctaccagatttttaaatgatct

SEQ ID NO: 40726 - DNA, 33 bp, Homo sapiens
tgcacaccccccactacacacacaagttctgtt

SEQ ID NO: 40727 - DNA, 51 bp, Homo sapiens
acacctctttctcttcatcacaaacaccctagttcaatccaccatcattgc

SEQ ID NO: 40728 - DNA, 33 bp, Homo sapiens
aggtgaagctgtcctcacagggataacaagaat

SEQ ID NO: 40729 - DNA, 33 bp, Homo sapiens
ttgcatcaggtgaggaataaaagagagagagag

SEQ ID NO: 40730 - DNA, 33 bp, Homo sapiens
gtgatgggaaactggaatattgagaggctcttg

SEQ ID NO: 40731 - DNA, 33 bp, Homo sapiens
agcgttttctctatgacggtttgcttaagagaa

SEQ ID NO: 40732 - DNA, 33 bp, Homo sapiens
aacatcaggaaattagcccaaagcatctcaaaa

SEQ ID NO: 40733 - DNA, 33 bp, Homo sapiens
aaacaacttgacgagaaagggtggatggaggga

SEQ ID NO: 40734 - DNA, 33 bp, Homo sapiens
ctacaaaatgcattaacggtgatgcaagcacta

SEQ ID NO: 40735 - DNA, 33 bp, Homo sapiens
tgagtaatattttaccaaggtcaatccagcttt

SEQ ID NO: 40736 - DNA, 33 bp, Homo sapiens
ctgggatagagagagaccgttggtgggcatgga

SEQ ID NO: 40737 - DNA, 33 bp, Homo sapiens
ccagtcaaggatttagccattaattctggatgg

SEQ ID NO: 40738 - DNA, 33 bp, Homo sapiens
tttgctctatctgtcccgatggtttgatttttc

SEQ ID NO: 40739 - DNA, 33 bp, Homo sapiens
ccacaagagtgggaaaaccagaatgagcagaag

SEQ ID NO: 40740 - DNA, 33 bp, Homo sapiens
gaatcaagagtgggaacgtctaaggaccgaagt

SEQ ID NO: 40741 - DNA, 33 bp, Homo sapiens
catgtcacttttgaaacgaaaatgccacactga

SEQ ID NO: 40742 - DNA, 33 bp, Homo sapiens
gaaatgatagatttgccaggaggtgaaagatgg

SEQ ID NO: 40743 - DNA, 33 bp, Homo sapiens
ctccaaattaaacacacacaggtaaccagaacc

SEQ ID NO: 40744 - DNA, 33 bp, Homo sapiens
ttccttgtcttagcaaatcctactccattgcct

SEQ ID NO: 40745 - DNA, 33 bp, Homo sapiens
atggtctgaatctgtcccctcttcctcccaaat

SEQ ID NO: 40746 - DNA, 33 bp, Homo sapiens
gcctccagaggaagataacaggtgagccagata

SEQ ID NO: 40747 - DNA, 33 bp, Homo sapiens
agtgatgcatgcccaactgatggcgaaataggt

SEQ ID NO: 40748 - DNA, 33 bp, Homo sapiens
agacacgtttcaaatacgaattgcattatcatt

SEQ ID NO: 40749 - DNA, 33 bp, Homo sapiens
ttgtccacattctgccaagtgaacgtgaacaat

SEQ ID NO: 40750 - DNA, 33 bp, Homo sapiens
gtctaggctctaaacactaaaactttgggctta

SEQ ID NO: 40751 - DNA, 33 bp, Homo sapiens
aacacactggcacacactgtctttcagcttaca

SEQ ID NO: 40752 - DNA, 33 bp, Homo sapiens
tcaccgaggatgctaacaagcagcacaggtgag

SEQ ID NO: 40753 - DNA, 33 bp, Homo sapiens
aagcaaaaatccgtaaagcaaatcattgagtca

SEQ ID NO: 40754 - DNA, 33 bp, Homo sapiens
gacaagagttgaacacagtctcacatctgtcag

SEQ ID NO: 40755 - DNA, 33 bp, Homo sapiens
aagagacagggactataagcagtaagaggtggg

SEQ ID NO: 40756 - DNA, 33 bp, Homo sapiens
ctctcttttgtttgtgaagctacaatattttcc

SEQ ID NO: 40757 - DNA, 33 bp, Homo sapiens
tgtgtttgtgtagctaccatgagatttgtggtc

SEQ ID NO: 40758 - DNA, 33 bp, Homo sapiens
gaatttgcctgctcaccgaaatgcatctataac

SEQ ID NO: 40759 - DNA, 33 bp, Homo sapiens
acaatatttcatccaccgatcaatgcataacct

SEQ ID NO: 40760 - DNA, 33 bp, Homo sapiens
cccggaggcctgaagacggtgcagatgcgctgt

SEQ ID NO: 40761 - DNA, 33 bp, Homo sapiens
gagcagggtctggaaacgaaggtgtgctccgct

SEQ ID NO: 40762 - DNA, 33 bp, Homo sapiens
ggaacacacacagggacaaatgacaggcaaata

SEQ ID NO: 40763 - DNA, 33 bp, Homo sapiens
cattggtaatccatcccatcactcttgtccact

SEQ ID NO: 40764 - DNA, 33 bp, Homo sapiens
cacagacgttggagccagatgacctgggttcac

SEQ ID NO: 40765 - DNA, 33 bp, Homo sapiens
gttttacagatgaggaagcgactctcagttaag

SEQ ID NO: 40766 - DNA, 33 bp, Homo sapiens
tgtttttatggcctacccatgctgagacatatt

SEQ ID NO: 40767 - DNA, 33 bp, Homo sapiens
ggacccacagctgagaaggaacaagcctcccca

SEQ ID NO: 40768 - DNA, 33 bp, Homo sapiens
ggatggaaggcacagcaaatggcaggaggatgg

SEQ ID NO: 40769 - DNA, 33 bp, Homo sapiens
ataaacaacatatgccaattaacagacaaaggc

SEQ ID NO: 40770 - DNA, 33 bp, Homo sapiens
ggacatctgaactagcagcgtttgtggaattgg

SEQ ID NO: 40771 - DNA, 51 bp, Homo sapiens
aattgtgaaccatcagaatagaaacaatgcaatacttaaacattatgagat

SEQ ID NO: 40772 - DNA, 33 bp, Homo sapiens
ttttggtacaataacagaattacttcatcttca

SEQ ID NO: 40773 - DNA, 33 bp, Homo sapiens
taaccttccagtcatcagaattgtgggccaaat

SEQ ID NO: 40774 - DNA, 33 bp, Homo sapiens
aaatgaagcccttggacggtcagtgacgaccct

SEQ ID NO: 40775 - DNA, 33 bp, Homo sapiens
ccagtcacttcctgataaatatcctgcataaac

SEQ ID NO: 40776 - DNA, 33 bp, Homo sapiens
tgccagacatttcagaagtaaacatggcttatt

SEQ ID NO: 40777 - DNA, 33 bp, Homo sapiens
ctttatgtgtcagtcactagtgtatattgattt

SEQ ID NO: 40778 - DNA, 33 bp, Homo sapiens
tgctgggggaagaccactaacagaaggctgtga

SEQ ID NO: 40779 - DNA, 33 bp, Homo sapiens
tttttttaaccactgagatgtttttgaggcatt

SEQ ID NO: 40780 - DNA, 33 bp, Homo sapiens
agtctgttattgtatacgaaacacttcccaggg

SEQ ID NO: 40781 - DNA, 33 bp, Homo sapiens
tgactgaaaatcatcactatgagcattggctgt

SEQ ID NO: 40782 - DNA, 33 bp, Homo sapiens
gtaactaccttaaaaccgacaactgtgcaaaac

SEQ ID NO: 40783 - DNA, 33 bp, Homo sapiens
ttggagaagaataaagccgatacattcacatat

SEQ ID NO: 40784 - DNA, 33 bp, Homo sapiens
gaaagaattcaaggaaatccataaagtaaaagc

SEQ ID NO: 40785 - DNA, 33 bp, Homo sapiens
gcagagaaagcataaccgcccttgacaaaacgg

SEQ ID NO: 40786 - DNA, 33 bp, Homo sapiens
agtattactgaaatgcagaactcacaaatgtgc

SEQ ID NO: 40787 - DNA, 33 bp, Homo sapiens
aggcgaaaagttaaacaatcagccagtgaaact

SEQ ID NO: 40788 - DNA, 33 bp, Homo sapiens
tctttttatctggagaatagccctttgttgtgg

SEQ ID NO: 40789 - DNA, 33 bp, Homo sapiens
ccatgcataagccatgcagtttataatatttgg

SEQ ID NO: 40790 - DNA, 33 bp, Homo sapiens
acaaatgattatttgaaggcttaagcaagtgta

SEQ ID NO: 40791 - DNA, 33 bp, Homo sapiens
tgtcacagttctgccactgaagagccaaagaac

SEQ ID NO: 40792 - DNA, 33 bp, Homo sapiens
ctttctcatatggttgaacaggcgattttgcgc

SEQ ID NO: 40793 - DNA, 33 bp, Homo sapiens
agtctctagcgtctaccagggtgagcatgagcc

SEQ ID NO: 40794 - DNA, 33 bp, Homo sapiens
cttgtcagtgttctgccgagctacttttatctg

SEQ ID NO: 40795 - DNA, 51 bp, Homo sapiens
gtgaggacacaacccagaagaataaaatcagaggactgacgtgactcaagt

SEQ ID NO: 40796 - DNA, 33 bp, Homo sapiens
gttctcctggctgaacacttggtcaacaatgct

SEQ ID NO: 40797 - DNA, 33 bp, Homo sapiens
agcatgtttcatgtgcacctctaagctctgcca

SEQ ID NO: 40798 - DNA, 33 bp, Homo sapiens
taccctgcatttccaaaattcccttgcagctag

SEQ ID NO: 40799 - DNA, 33 bp, Homo sapiens
tccagtcacaaccagccgagcatgacttaggtc

SEQ ID NO: 40800 - DNA, 33 bp, Homo sapiens
agatagatgcctccaaatatgatcacgcaagcc

SEQ ID NO: 40801 - DNA, 33 bp, Homo sapiens
ctgccccagggggacaatatggagacaacgttg

SEQ ID NO: 40802 - DNA, 33 bp, Homo sapiens
ggctgagggcagcgacaacctacaaagcaatag

SEQ ID NO: 40803 - DNA, 33 bp, Homo sapiens
tggacatcgagaaaacagaaccctcatctggcc

SEQ ID NO: 40804 - DNA, 33 bp, Homo sapiens
aggttaggacttaagaagcatctcaagggacag

SEQ ID NO: 40805 - DNA, 33 bp, Homo sapiens
ggcatgccagactcaaacgtgtccttgaacata

SEQ ID NO: 40806 - DNA, 33 bp, Homo sapiens
atacgttaaaggcactaaagagagatgaagtgc

SEQ ID NO: 40807 - DNA, 33 bp, Homo sapiens
atccgctagtgagcgacgggtaggtctggagat

SEQ ID NO: 40808 - DNA, 33 bp, Homo sapiens
ttcattcagggtcacaatgctagccatgtcatc

SEQ ID NO: 40809 - DNA, 33 bp, Homo sapiens
cctgcttacataattcaaaagaggtataactgc

SEQ ID NO: 40810 - DNA, 33 bp, Homo sapiens
gttctttgaagctttccattggttacaattcca

SEQ ID NO: 40811 - DNA, 33 bp, Homo sapiens
gaatcaataagttcaaaggcttgaaacaaagtc

SEQ ID NO: 40812 - DNA, 33 bp, Homo sapiens
gcttcaccaatgctagaaggtccttgaaactag

SEQ ID NO: 40813 - DNA, 33 bp, Homo sapiens
agaaggcgaagaacaccgaacatcttcttggag

SEQ ID NO: 40814 - DNA, 33 bp, Homo sapiens
gtgtccagaatcccaacccagagacagaggact

SEQ ID NO: 40815 - DNA, 33 bp, Homo sapiens
tagctttatctgggtcccttttcaaatgttacc

SEQ ID NO: 40816 - DNA, 33 bp, Homo sapiens
ctaaagtggaagtatacgcagagctgtgtgtct

SEQ ID NO: 40817 - DNA, 33 bp, Homo sapiens
tcgaaattgtagttgacatacatctagaggtct

SEQ ID NO: 40818 - DNA, 33 bp, Homo sapiens
acacaggatgggacaacgtgaccacagtggatg

SEQ ID NO: 40819 - DNA, 33 bp, Homo sapiens
tattgctcaactaagcaacttcggtaatcatgc

SEQ ID NO: 40820 - DNA, 33 bp, Homo sapiens
accaaagactgaaagacgcaatagtcctctggg

SEQ ID NO: 40821 - DNA, 33 bp, Homo sapiens
tgctaccttttacatacgacagcttctctaccc

SEQ ID NO: 40822 - DNA, 33 bp, Homo sapiens
acaggagcaaatgttccgaaaagaggacacaat

SEQ ID NO: 40823 - DNA, 33 bp, Homo sapiens
atgttgtttttcttgacgtgcaatgtgaggcag

SEQ ID NO: 40824 - DNA, 33 bp, Homo sapiens
caccgtgggaaggaccagcaagtgagaccatgc

SEQ ID NO: 40825 - DNA, 33 bp, Homo sapiens
gaatagaaactctctccccgtgtctccaggttt

SEQ ID NO: 40826 - DNA, 33 bp, Homo sapiens
gataatcacataccaagatacaaatgttgcata

SEQ ID NO: 40827 - DNA, 33 bp, Homo sapiens
cggacatcaggaaggcacagtgaacatgaaaca

SEQ ID NO: 40828 - DNA, 33 bp, Homo sapiens
gccgtgtgtatttcaaatctactttccgtttat

SEQ ID NO: 40829 - DNA, 33 bp, Homo sapiens
tgctggtttatgtcatcaataaaatgctgcaat

SEQ ID NO: 40830 - DNA, 33 bp, Homo sapiens
tgtgggcaaagggcaacgtctctcctgtgcaca

SEQ ID NO: 40831 - DNA, 33 bp, Homo sapiens
tagcagctgatgcaaaatggtagcactatacat

SEQ ID NO: 40832 - DNA, 33 bp, Homo sapiens
agagcccccaccccaacggacgatggaggctcg

SEQ ID NO: 40833 - DNA, 33 bp, Homo sapiens
ccagcctttatgaagcacttactgtgtaccaga

SEQ ID NO: 40834 - DNA, 33 bp, Homo sapiens
ctctatgaagcaaatacagttgttgccagatgt

SEQ ID NO: 40835 - DNA, 33 bp, Homo sapiens
aattcacacgagattaagatcatgcagagatac

SEQ ID NO: 40836 - DNA, 33 bp, Homo sapiens
ccacattaagaagtgacgaccatctatcagctc

SEQ ID NO: 40837 - DNA, 33 bp, Homo sapiens
agcaggtgcttcgagaaagtgtatccacagctg

SEQ ID NO: 40838 - DNA, 33 bp, Homo sapiens
gatgccacacccatgacgagtcgaagcaaaggg

SEQ ID NO: 40839 - DNA, 51 bp, Homo sapiens
cttagtagagaaagatttctttaaacggatacaaaaagcacaaaacataaa

SEQ ID NO: 40840 - DNA, 51 bp, Homo sapiens
atcagcctaagaaagaaaagtatcccaacttcttcctatgtatgaagttcc

SEQ ID NO: 40841 - DNA, 33 bp, Homo sapiens
ggagcctgccagaagggagtgagcttgtgctga

SEQ ID NO: 40842 - DNA, 51 bp, Homo sapiens
attggcagtgacttgttacaacagcacagacaactcacagagatggcaaag

SEQ ID NO: 40843 - DNA, 51 bp, Homo sapiens
ctcatgagctccatgaaattgtttacaaaagtctatgtcaggtcgggcatg

SEQ ID NO: 40844 - DNA, 33 bp, Homo sapiens
gctcacaagttcgagaccacactggacaacatg

SEQ ID NO: 40845 - DNA, 33 bp, Homo sapiens
gttgactccataactaaattccatagtcataaa

SEQ ID NO: 40846 - DNA, 33 bp, Homo sapiens
agatattgtcggattcaatttttttaaaggcaa

SEQ ID NO: 40847 - DNA, 33 bp, Homo sapiens
accactgttctggacaccacgttattgctcaag

SEQ ID NO: 40848 - DNA, 33 bp, Homo sapiens
tctgacagtcaagcagcagtaactgtgctggga

SEQ ID NO: 40849 - DNA, 33 bp, Homo sapiens
atgccactccacttacccattcaacaataaact

SEQ ID NO: 40850 - DNA, 33 bp, Homo sapiens
gatggccttgcctttacaatgctcagggtttgg

SEQ ID NO: 40851 - DNA, 33 bp, Homo sapiens
agcctgaacaaaaatccagcctaagcaaaaaga

SEQ ID NO: 40852 - DNA, 33 bp, Homo sapiens
atttatttcgtgaacactggggttgcttttttc

SEQ ID NO: 40853 - DNA, 33 bp, Homo sapiens
ggccctaatcaaggaacattcgtttttctcaga

SEQ ID NO: 40854 - DNA, 33 bp, Homo sapiens
atacaatgcatagtaaacctttctcccatataa

SEQ ID NO: 40855 - DNA, 51 bp, Homo sapiens
ggagagaagacgtttcaagtcccagcatagaaaacgccagtcctactgctc

SEQ ID NO: 40856 - DNA, 33 bp, Homo sapiens
atgtctttggtaccaacgtattcatatttctgt

SEQ ID NO: 40857 - DNA, 51 bp, Homo sapiens
aactttctcaactggataacgaatacctacaaaagaacttatagctaacac

SEQ ID NO: 40858 - DNA, 33 bp, Homo sapiens
atgtcctagctaaaatcatagtttcctccacgt

SEQ ID NO: 40859 - DNA, 33 bp, Homo sapiens
ttatctaagaaagcacggactacaatgtattta

SEQ ID NO: 40860 - DNA, 33 bp, Homo sapiens
cctaagggactttaaccagaattcttctttttt

SEQ ID NO: 40861 - DNA, 33 bp, Homo sapiens
tcacagtgtggattaaagaggaagtgcccacgt

SEQ ID NO: 40862 - DNA, 33 bp, Homo sapiens
tgaaagacttttgaagacccaacaaaattgttg

SEQ ID NO: 40863 - DNA, 33 bp, Homo sapiens
gcaatatttttacaaaaccagaatgcgaccttc

SEQ ID NO: 40864 - DNA, 51 bp, Homo sapiens
ctaaaaccatcagtaagacggatcacgctaagatgaaggcttttgctcaga

SEQ ID NO: 40865 - DNA, 51 bp, Homo sapiens
ttggtatttctcgttatcaagcataggtggtatagtagcagaagtcaaaaa

SEQ ID NO: 40866 - DNA, 51 bp, Homo sapiens
cgatcaagtaatttttgagtgaaaacatcaagtagataaaaatcccaagaa

SEQ ID NO: 40867 - DNA, 33 bp, Homo sapiens
tgcatacagatgcatactaagtgttaaacaata

SEQ ID NO: 40868 - DNA, 33 bp, Homo sapiens
ttaaacccagtaaggaccttgaacagtagacat

SEQ ID NO: 40869 - DNA, 33 bp, Homo sapiens
ggatctgggctcttgaacaaatgttagaagttt

SEQ ID NO: 40870 - DNA, 33 bp, Homo sapiens
atgtgtgtaaagatgccatttagtgagtttgct

SEQ ID NO: 40871 - DNA, 33 bp, Homo sapiens
cttaatgtttaatatacgtataatgcactatgt

SEQ ID NO: 40872 - DNA, 33 bp, Homo sapiens
aacgatttcagctaccaggaaagattaccctgc

SEQ ID NO: 40873 - DNA, 33 bp, Homo sapiens
aataagctcgtggataagaaacacgttatgcct

SEQ ID NO: 40874 - DNA, 33 bp, Homo sapiens
tgtgcaaatctgtcgacaacttctcttctactc

SEQ ID NO: 40875 - DNA, 33 bp, Homo sapiens
tatttataaaatcttcaatggcctctgtgcaaa

SEQ ID NO: 40876 - DNA, 33 bp, Homo sapiens
cttgaaattgactcagacaaatggtagactgta

SEQ ID NO: 40877 - DNA, 33 bp, Homo sapiens
tgggatcacaatggaaagaagtaacagtagaaa

SEQ ID NO: 40878 - DNA, 33 bp, Homo sapiens
caagaaggagattaaaatatatgcagcccaagg

SEQ ID NO: 40879 - DNA, 33 bp, Homo sapiens
tctaacattcctggtaacacggtcacagcaaac

SEQ ID NO: 40880 - DNA, 33 bp, Homo sapiens
gtttcactctgttcctcactcttccttcagcgc

SEQ ID NO: 40881 - DNA, 33 bp, Homo sapiens
ttcttagtgtagttaaaccagtattccaatcca

SEQ ID NO: 40882 - DNA, 33 bp, Homo sapiens
agtggccataaaactcaacattttacacattat

SEQ ID NO: 40883 - DNA, 33 bp, Homo sapiens
aagtcttcgagggtacaaaacaaggaactatgg

SEQ ID NO: 40884 - DNA, 33 bp, Homo sapiens
actactagggcagatcccaactgattagagatg

SEQ ID NO: 40885 - DNA, 33 bp, Homo sapiens
aatgccccagctcttcccaatttcctaacatac

SEQ ID NO: 40886 - DNA, 33 bp, Homo sapiens
cactgctgcacatctaagatatattctctaaca

SEQ ID NO: 40887 - DNA, 33 bp, Homo sapiens
tagtctcaacatagacaacttagaggtcattga

SEQ ID NO: 40888 - DNA, 33 bp, Homo sapiens
ctgatcatctttcaaccgatgctcccacagcct

SEQ ID NO: 40889 - DNA, 33 bp, Homo sapiens
gactgtcaaaagccacaatggacagcattcata

SEQ ID NO: 40890 - DNA, 33 bp, Homo sapiens
gtgactgtaaatgcgcacaactcagaaggggag

SEQ ID NO: 40891 - DNA, 33 bp, Homo sapiens
aaaaaatctacctatcacaggcaatctctaggg

SEQ ID NO: 40892 - DNA, 33 bp, Homo sapiens
cttaggccaatgcctaacacttactaaatagcc

SEQ ID NO: 40893 - DNA, 33 bp, Homo sapiens
catgcttgtggaatacagtaaaccaggcatcat

SEQ ID NO: 40894 - DNA, 33 bp, Homo sapiens
atccttaacagccttcaatgttgtctgtgttct

SEQ ID NO: 40895 - DNA, 33 bp, Homo sapiens
aaaagtacataataaacgtataagactgagatg

SEQ ID NO: 40896 - DNA, 33 bp, Homo sapiens
gaaggatggaagataaaaaatgcatgtggacac

SEQ ID NO: 40897 - DNA, 33 bp, Homo sapiens
gcccaagtcccaactcagaggtcctaagtagac

SEQ ID NO: 40898 - DNA, 33 bp, Homo sapiens
gagagaggtgaagaaaagtttgaagctagtaga

SEQ ID NO: 40899 - DNA, 33 bp, Homo sapiens
caggcaagaatcaggacagggtaatttctgggg

SEQ ID NO: 40900 - DNA, 33 bp, Homo sapiens
ctgtggtttctcccaacggcagcaacttcaggg

SEQ ID NO: 40901 - DNA, 33 bp, Homo sapiens
tgttcttgatgggttccatttttatttgcccct

SEQ ID NO: 40902 - DNA, 33 bp, Homo sapiens
ctggcctcttcatgccaacgaggttctcatgta

SEQ ID NO: 40903 - DNA, 33 bp, Homo sapiens
ggaataaatatctgtcactcacaacccctgagt

SEQ ID NO: 40904 - DNA, 33 bp, Homo sapiens
tacttccagaaagcacaggatactgtcatcttt

SEQ ID NO: 40905 - DNA, 33 bp, Homo sapiens
accatctatgtaacctaaaatctgtcatctgta

SEQ ID NO: 40906 - DNA, 33 bp, Homo sapiens
agaaaatgccagaatacaacacgaatgcctatt

SEQ ID NO: 40907 - DNA, 33 bp, Homo sapiens
cagctgcctggaggatcaggagagacttcccca

SEQ ID NO: 40908 - DNA, 33 bp, Homo sapiens
gcccttaaaatcaccactgccaggtaagtgtcc

SEQ ID NO: 40909 - DNA, 33 bp, Homo sapiens
ccatctgtagcctaaaaacaatgttgccaaggg

SEQ ID NO: 40910 - DNA, 33 bp, Homo sapiens
gttgaccaccccgatagagaattttgtgatttc

SEQ ID NO: 40911 - DNA, 33 bp, Homo sapiens
tgtggctaagaggttcaaataaatgttctcagg

SEQ ID NO: 40912 - DNA, 33 bp, Homo sapiens
gaatcctagcttcctaaatagttggtaaaatgt

SEQ ID NO: 40913 - DNA, 33 bp, Homo sapiens
gcattctatatcgtaaactctgcaaacctccac

SEQ ID NO: 40914 - DNA, 33 bp, Homo sapiens
atcttgaagaagaaaacgtctttcaaaatatta

SEQ ID NO: 40915 - DNA, 33 bp, Homo sapiens
aattttctaatgattacgataggaaaaatagca

SEQ ID NO: 40916 - DNA, 33 bp, Homo sapiens
ccttcacaaaacttacagcaatcacaattgttg

SEQ ID NO: 40917 - DNA, 33 bp, Homo sapiens
catggaaatgtcctaacagtccttgtctcagag

SEQ ID NO: 40918 - DNA, 33 bp, Homo sapiens
actgcagcttccattaaattgtaaatactcttt

SEQ ID NO: 40919 - DNA, 33 bp, Homo sapiens
gaaacttctgtgacacagctccaaaaggtgcct

SEQ ID NO: 40920 - DNA, 33 bp, Homo sapiens
actgttactgttcacagagcaagttagtttagt

SEQ ID NO: 40921 - DNA, 33 bp, Homo sapiens
gtacaccatagtgggacagggtgccaggagacc

SEQ ID NO: 40922 - DNA, 33 bp, Homo sapiens
ttgtatttcctagctccatccactgaaagagct

SEQ ID NO: 40923 - DNA, 33 bp, Homo sapiens
tggcaaaattcttccaactcctctttgtttcaa

SEQ ID NO: 40924 - DNA, 33 bp, Homo sapiens
gaagattataatgaagcagaaaaagtcctactg

SEQ ID NO: 40925 - DNA, 33 bp, Homo sapiens
caactgggataaatacaacagaagtgagcgcag

SEQ ID NO: 40926 - DNA, 33 bp, Homo sapiens
atcctctaggcttcggaattttgtaaagctctc

SEQ ID NO: 40927 - DNA, 33 bp, Homo sapiens
tggcccatcacactaacaaccagaagatctgca

SEQ ID NO: 40928 - DNA, 33 bp, Homo sapiens
actaaggggctggaagacatcaagaaaggctgt

SEQ ID NO: 40929 - DNA, 33 bp, Homo sapiens
gtcagacaactggagaagaaacttaatgcaaca

SEQ ID NO: 40930 - DNA, 33 bp, Homo sapiens
gagtctcaagactccaatgcaaatgatgaaggc

SEQ ID NO: 40931 - DNA, 33 bp, Homo sapiens
aactggaattccatacactgcgagtgggaacat

SEQ ID NO: 40932 - DNA, 33 bp, Homo sapiens
atatggaaaatgaagagcacaaaaataaacctt

SEQ ID NO: 40933 - DNA, 33 bp, Homo sapiens
aagaacgtgttcgcccagaggttaggcgatttg

SEQ ID NO: 40934 - DNA, 33 bp, Homo sapiens
gtcatctacagtgaaaagtcaaaggagaattaa

SEQ ID NO: 40935 - DNA, 33 bp, Homo sapiens
cccactgattacaaacaatggaacttaaacaag

SEQ ID NO: 40936 - DNA, 33 bp, Homo sapiens
ctctgcctacagataacgcttttacatctctag

SEQ ID NO: 40937 - DNA, 33 bp, Homo sapiens
tttcactgtgcattcaacaaacaaaattgtcct

SEQ ID NO: 40938 - DNA, 33 bp, Homo sapiens
atttcattaatttgcccaaagtcacaggtgata

SEQ ID NO: 40939 - DNA, 33 bp, Homo sapiens
cttttccaaatgtaaacgtcagctataacaact

SEQ ID NO: 40940 - DNA, 33 bp, Homo sapiens
cagtgacctgctgaaaatcactctgtctctact

SEQ ID NO: 40941 - DNA, 33 bp, Homo sapiens
agcaaatcagcagttacattgactattacatca

SEQ ID NO: 40942 - DNA, 33 bp, Homo sapiens
accagagacttaggtccgaagcaaagagctgtg

SEQ ID NO: 40943 - DNA, 33 bp, Homo sapiens
caaattcatattcttaacaattcctttttggta

SEQ ID NO: 40944 - DNA, 33 bp, Homo sapiens
attgagcaactactacaagctgaaccctgatga

SEQ ID NO: 40945 - DNA, 33 bp, Homo sapiens
agtggccagcagagcaaggattttttctagaag

SEQ ID NO: 40946 - DNA, 33 bp, Homo sapiens
aagtcatctacttaacactcagttctagaattg

SEQ ID NO: 40947 - DNA, 33 bp, Homo sapiens
cctctcagcgctttccacatctcttcaggggct

SEQ ID NO: 40948 - DNA, 33 bp, Homo sapiens
caccaggataagtaggccacttttctgagcatc

SEQ ID NO: 40949 - DNA, 33 bp, Homo sapiens
tgggtgggctctaatccaacatgactggtgtcc

SEQ ID NO: 40950 - DNA, 33 bp, Homo sapiens
gtgcatcagctcaaggcaactggtgtggctctg

SEQ ID NO: 40951 - DNA, 33 bp, Homo sapiens
tggaactccacagccaaaagattagacgttgtt

SEQ ID NO: 40952 - DNA, 33 bp, Homo sapiens
tctttctggtagaggagcctatttgggaaacaa

SEQ ID NO: 40953 - DNA, 33 bp, Homo sapiens
tccctacattaaggaaatacgacaaacacgagg

SEQ ID NO: 40954 - DNA, 33 bp, Homo sapiens
gaatgataggtagttacacagagagaatcccta

SEQ ID NO: 40955 - DNA, 33 bp, Homo sapiens
atatcaaaatctgcataagcagcccaggtgaga

SEQ ID NO: 40956 - DNA, 33 bp, Homo sapiens
cgcttctgaagatttaagagagagcggtcacat

SEQ ID NO: 40957 - DNA, 51 bp, Homo sapiens
atctggctacccacacctggatttaggttcccatggcccacaactgaaaag

SEQ ID NO: 40958 - DNA, 33 bp, Homo sapiens
tgtcgcctttgtttcaacgccttcagtctcccc

SEQ ID NO: 40959 - DNA, 33 bp, Homo sapiens
accacacttagtcacaaaaatctttaaaagaat

SEQ ID NO: 40960 - DNA, 33 bp, Homo sapiens
tagacaccaccagtcccgagctgggcaaccctg

SEQ ID NO: 40961 - DNA, 33 bp, Homo sapiens
gaggattttagaagaacgatggtgtttacagtc

SEQ ID NO: 40962 - DNA, 33 bp, Homo sapiens
tgttctacatccacctcaagtgtgcaggccttt

SEQ ID NO: 40963 - DNA, 33 bp, Homo sapiens
gcatggactttaccaaactgatctcaggtcaaa

SEQ ID NO: 40964 - DNA, 33 bp, Homo sapiens
ggctcagggacaatgacgattcagctaacctag

SEQ ID NO: 40965 - DNA, 33 bp, Homo sapiens
gatttacacaccaatcacaagaaatgactggca

SEQ ID NO: 40966 - DNA, 33 bp, Homo sapiens
tctttttactacttaccccaaccctctcagagc

SEQ ID NO: 40967 - DNA, 51 bp, Homo sapiens
attccaggccaatattcttttactcccaattccttctattaatataccacc

SEQ ID NO: 40968 - DNA, 33 bp, Homo sapiens
tagggaaggaagctacactcctagtataccaga

SEQ ID NO: 40969 - DNA, 33 bp, Homo sapiens
tacctgtgttacagaccatgggctcttagattc

SEQ ID NO: 40970 - DNA, 51 bp, Homo sapiens
tccacaatcaattctcattgtatgagacctaatgtttgaaggtgctatgct

SEQ ID NO: 40971 - DNA, 51 bp, Homo sapiens
tataatcgctgtcttgcatttattcgcagtgaacttacccctctctcttcc

SEQ ID NO: 40972 - DNA, 33 bp, Homo sapiens
tttaacatacttgtcacgagagggtaatacttt

SEQ ID NO: 40973 - DNA, 33 bp, Homo sapiens
acatacggcatttaagaaaattttgtggttagt

SEQ ID NO: 40974 - DNA, 33 bp, Homo sapiens
tccttgtagagaccaccgcctgtataatgaatc

SEQ ID NO: 40975 - DNA, 33 bp, Homo sapiens
gcaactaatagtgccaataagtaaaaactacaa

SEQ ID NO: 40976 - DNA, 33 bp, Homo sapiens
actgaatagtatttgccgaagatcgttttaaaa

SEQ ID NO: 40977 - DNA, 33 bp, Homo sapiens
ttcattcattcaaaaaacatgtactgtccatga

SEQ ID NO: 40978 - DNA, 33 bp, Homo sapiens
tgatgcctattgattacgaatatggttgtcctt

SEQ ID NO: 40979 - DNA, 33 bp, Homo sapiens
ctgtttctacgccacaataataaacacatcgga

SEQ ID NO: 40980 - DNA, 33 bp, Homo sapiens
catgtcagggtgctaaatccttatccctagaga

SEQ ID NO: 40981 - DNA, 33 bp, Homo sapiens
tggagttgatttcaaccggactaagccaatttc

SEQ ID NO: 40982 - DNA, 33 bp, Homo sapiens
ttaagctgctacatgaaatgcaaaatcattaag

SEQ ID NO: 40983 - DNA, 33 bp, Homo sapiens
gagatagcaatataaactcagcagcttgcagac

SEQ ID NO: 40984 - DNA, 33 bp, Homo sapiens
aataaacctgcttcaaacttcatcaatcattgt

SEQ ID NO: 40985 - DNA, 33 bp, Homo sapiens
tccctgtcgttacagaacttacagaatcatcag

SEQ ID NO: 40986 - DNA, 33 bp, Homo sapiens
ctcctccaccccattgcatataagcctggaggt

SEQ ID NO: 40987 - DNA, 33 bp, Homo sapiens
tggggaatctacctacgcatctacatttcctag

SEQ ID NO: 40988 - DNA, 33 bp, Homo sapiens
tctggacatatactgaaggcttaaccttgaata

SEQ ID NO: 40989 - DNA, 33 bp, Homo sapiens
cagagttagagataaaagtcacataatgcttag

SEQ ID NO: 40990 - DNA, 33 bp, Homo sapiens
ttcttttaacaaaggacggccttatttcttatc

SEQ ID NO: 40991 - DNA, 33 bp, Homo sapiens
aactactatttactgaactagagagaaaaggac

SEQ ID NO: 40992 - DNA, 33 bp, Homo sapiens
ctgtgaccctttgcaacgaaccttccaccctgc

SEQ ID NO: 40993 - DNA, 33 bp, Homo sapiens
tgattaaattatgctcacaagatcagttcctag

SEQ ID NO: 40994 - DNA, 33 bp, Homo sapiens
actgatcagcctgaagaatcttatagtgccaaa

SEQ ID NO: 40995 - DNA, 33 bp, Homo sapiens
taaaatcacatagaaagtgccacacaaatgtta

SEQ ID NO: 40996 - DNA, 33 bp, Homo sapiens
ttggcatgcctctctcaatcaatatatctttac

SEQ ID NO: 40997 - DNA, 33 bp, Homo sapiens
agacagatccgcacctgaattactatgcctaaa

SEQ ID NO: 40998 - DNA, 33 bp, Homo sapiens
tagctatttcctcagtcacaaagaatagtgtgt

SEQ ID NO: 40999 - DNA, 33 bp, Homo sapiens
tgttcatcagatctgcactattagagatgagtc

SEQ ID NO: 41000 - DNA, 33 bp, Homo sapiens
cagatttgatatagccaaagaaagatttagtaa

SEQ ID NO: 41001 - DNA, 33 bp, Homo sapiens
aagtcaccccttcctacgatgcaactgctgtaa

SEQ ID NO: 41002 - DNA, 51 bp, Homo sapiens
atttgaaaatatacagccagaggaaatataagaaaaaagaataaaaaaaga

SEQ ID NO: 41003 - DNA, 33 bp, Homo sapiens
aaaacaaaaccaagaaacagatcagttcacaaa

SEQ ID NO: 41004 - DNA, 51 bp, Homo sapiens
ctttcttctttggggatgaagagtacggactttgttatcaggcagacgtgg

SEQ ID NO: 41005 - DNA, 51 bp, Homo sapiens
tatcaagaataactaaagcctttcaatgttacactatgcaatccctagcca

SEQ ID NO: 41006 - DNA, 51 bp, Homo sapiens
attttaatgctgacacacagagtaacaatcccatggcccagcactacgtca

SEQ ID NO: 41007 - DNA, 51 bp, Homo sapiens
atctctcttattctatttgtaaaaaagagattagattcaatagttttcata

SEQ ID NO: 41008 - DNA, 51 bp, Homo sapiens
gttggcacttacaatttagctgttcaaaataatctattattagcactaatt

SEQ ID NO: 41009 - DNA, 51 bp, Homo sapiens
aacaaaaactttgggccatggtggaatcaatctaaatatatcctttttgcc

SEQ ID NO: 41010 - DNA, 33 bp, Homo sapiens
cttccaacattgtgcactaagtcatttggaatc

SEQ ID NO: 41011 - DNA, 51 bp, Homo sapiens
tttgtaaaactgtccctttcctcacagtattgtggtatgacatttctcacc

SEQ ID NO: 41012 - DNA, 33 bp, Homo sapiens
tgacctagatggtccagaaattaagatcactca

SEQ ID NO: 41013 - DNA, 33 bp, Homo sapiens
aaaaggaattataaagccttcaagcatttttgg

SEQ ID NO: 41014 - DNA, 33 bp, Homo sapiens
gctgggcactgggctgccaattctgtggatcag

SEQ ID NO: 41015 - DNA, 33 bp, Homo sapiens
tctattctctgacttacagctttttttgtatga

SEQ ID NO: 41016 - DNA, 33 bp, Homo sapiens
agttctgctgcatgagactagagcaccaggtag

SEQ ID NO: 41017 - DNA, 33 bp, Homo sapiens
tttctcattaatttaccggtcattcaggagcat

SEQ ID NO: 41018 - DNA, 33 bp, Homo sapiens
gtatttgataactgagaagtcattagcaatctg

SEQ ID NO: 41019 - DNA, 33 bp, Homo sapiens
aggagcagtcacagtacagcagtgggtttgaat

SEQ ID NO: 41020 - DNA, 33 bp, Homo sapiens
ggctcaaacatagacaaaaactgtcgagtcctg

SEQ ID NO: 41021 - DNA, 33 bp, Homo sapiens
acatggcaaggaacatcagtggttatgactgat

SEQ ID NO: 41022 - DNA, 33 bp, Homo sapiens
tttagtcatttcacaccccttttgtagccttct

SEQ ID NO: 41023 - DNA, 33 bp, Homo sapiens
atccctaagtaaggacaagtgcttgggaattaa

SEQ ID NO: 41024 - DNA, 33 bp, Homo sapiens
gcactggaaaagatgacgacaattgtctaattc

SEQ ID NO: 41025 - DNA, 33 bp, Homo sapiens
gttattctcatacatacggagttcacaaaattt

SEQ ID NO: 41026 - DNA, 33 bp, Homo sapiens
agcccaaaccctaagactatggagaaccaaaga

SEQ ID NO: 41027 - DNA, 33 bp, Homo sapiens
gctttcaaagaggctaccttagggtttatacta

SEQ ID NO: 41028 - DNA, 33 bp, Homo sapiens
tctcctttaacaatcccattaatgtgtaggacg

SEQ ID NO: 41029 - DNA, 33 bp, Homo sapiens
actgactgtctactcacaggactaagtgacctt

SEQ ID NO: 41030 - DNA, 51 bp, Homo sapiens
gtgggcctatcttttactaagaggaaaagaatgtgcagtcccacccacagc

SEQ ID NO: 41031 - DNA, 51 bp, Homo sapiens
tttaatgttgactttggagttggcacactggaaaagaattagaggtaagat

SEQ ID NO: 41032 - DNA, 33 bp, Homo sapiens
cctaggcacactgccacgttcttcgtctatgtt

SEQ ID NO: 41033 - DNA, 33 bp, Homo sapiens
acaacaacaacaactacgggataaggatataaa

SEQ ID NO: 41034 - DNA, 33 bp, Homo sapiens
gactgactgtgttccacagcttaataatgctct

SEQ ID NO: 41035 - DNA, 33 bp, Homo sapiens
ttagaaaagaacaataactaacaataccctaac

SEQ ID NO: 41036 - DNA, 33 bp, Homo sapiens
ctacttcacaccttggaaacatcgtgaacatca

SEQ ID NO: 41037 - DNA, 33 bp, Homo sapiens
caaaggtggtcacagaactatactgcaagtacc

SEQ ID NO: 41038 - DNA, 33 bp, Homo sapiens
attttcattcaacctaaggaaggatcttaagaa

SEQ ID NO: 41039 - DNA, 33 bp, Homo sapiens
cagtaatagctccttaaacactcagtatctttc

SEQ ID NO: 41040 - DNA, 33 bp, Homo sapiens
gggaaaccatgggtaaacctttcattgtggtgt

SEQ ID NO: 41041 - DNA, 51 bp, Homo sapiens
atacaggagaaagctgaggttcacaaaagtagatttcttctccgacatcct

SEQ ID NO: 41042 - DNA, 33 bp, Homo sapiens
aaccagggaggactcccctcgcaccaggatctc

SEQ ID NO: 41043 - DNA, 33 bp, Homo sapiens
caggagaaactgcagaaccctcttcatcccaaa

SEQ ID NO: 41044 - DNA, 33 bp, Homo sapiens
gctcaagagagatcaaagtacttactctcatga

SEQ ID NO: 41045 - DNA, 33 bp, Homo sapiens
gctgctcctcattctcacaaactctgtggatag

SEQ ID NO: 41046 - DNA, 33 bp, Homo sapiens
tgtcaatatgatgtggcagtcgaaaaggtgaaa

SEQ ID NO: 41047 - DNA, 33 bp, Homo sapiens
gattctctgccttagacgagtgttcaggagagc

SEQ ID NO: 41048 - DNA, 33 bp, Homo sapiens
cagaaattgtcattccccttgtcactcagaaga

SEQ ID NO: 41049 - DNA, 33 bp, Homo sapiens
acgtttgagagatttaaggaggaaaaagcaaca

SEQ ID NO: 41050 - DNA, 33 bp, Homo sapiens
actataacctgtttgaacatcacatctcaggta

SEQ ID NO: 41051 - DNA, 33 bp, Homo sapiens
aggcaggtcctgctaaacaagtgatcccatgaa

SEQ ID NO: 41052 - DNA, 51 bp, Homo sapiens
tgttttatctagtttggctaaatacaacttatggttcaaagagaaaatgca

SEQ ID NO: 41053 - DNA, 33 bp, Homo sapiens
ggccacatgacacttcactgagtatctacagca

SEQ ID NO: 41054 - DNA, 51 bp, Homo sapiens
ggagaaatagtgtacgtgttggagagactcagacagggtactaggaaaaat

SEQ ID NO: 41055 - DNA, 33 bp, Homo sapiens
tcacactcatacaataagcagcaatgccacatc

SEQ ID NO: 41056 - DNA, 33 bp, Homo sapiens
tattgatatttatttacacagcggctattcatt

SEQ ID NO: 41057 - DNA, 33 bp, Homo sapiens
agggtcagatgttaaacggagacagctggagcc

SEQ ID NO: 41058 - DNA, 33 bp, Homo sapiens
aaggacagggtcaccacaatttctttcataaga

SEQ ID NO: 41059 - DNA, 33 bp, Homo sapiens
ttctaaacatgacttacagagttttcttctggg

SEQ ID NO: 41060 - DNA, 33 bp, Homo sapiens
cggatgcagcaagaaacgaagtcaggatgggag

SEQ ID NO: 41061 - DNA, 33 bp, Homo sapiens
tctgtttcctttattaccatgtaagctttatga

SEQ ID NO: 41062 - DNA, 33 bp, Homo sapiens
actattattatctcccaagtttactatatcata

SEQ ID NO: 41063 - DNA, 33 bp, Homo sapiens
gtagcagtggcatgtgaaaaattcttgttttaa

SEQ ID NO: 41064 - DNA, 51 bp, Homo sapiens
agcatctattatgaacgttcaaggaatataaaagtaaggtaaaagcttttc

SEQ ID NO: 41065 - DNA, 51 bp, Homo sapiens
tgtcctgtgcctcaggatctcttacccatagttgtattgttttttcatttt

SEQ ID NO: 41066 - DNA, 51 bp, Homo sapiens
ctgctttttctgcagtaatcccataactttctattcacatttcttttatga

SEQ ID NO: 41067 - DNA, 51 bp, Homo sapiens
aagtgacctttcatccgagtcttgaaggaagagtgagaaaaggagcaattt

SEQ ID NO: 41068 - DNA, 33 bp, Homo sapiens
tggactatgcattggaactaggtggtctttatc

SEQ ID NO: 41069 - DNA, 33 bp, Homo sapiens
ctgcatttccaactgacgtaccaggccatctta

SEQ ID NO: 41070 - DNA, 33 bp, Homo sapiens
aagtgattcattccaaacatctgatgggttccc

SEQ ID NO: 41071 - DNA, 51 bp, Homo sapiens
gcagccaagattcaatgcttggaaaggaagtttaagttggaggacaaacaa

SEQ ID NO: 41072 - DNA, 33 bp, Homo sapiens
attcttgttctcaaaaacttacattctgatcca

SEQ ID NO: 41073 - DNA, 33 bp, Homo sapiens
agatgattctttgttacgaagcttacactcatt

SEQ ID NO: 41074 - DNA, 51 bp, Homo sapiens
acaacactgtcagttgctgtcctgaagaaggtggccaggagctctagaagg

SEQ ID NO: 41075 - DNA, 33 bp, Homo sapiens
tatacacatatgtgacccttcccactctctggc

SEQ ID NO: 41076 - DNA, 33 bp, Homo sapiens
gaaactatgacagaggaaaagtaagtgttttaa

SEQ ID NO: 41077 - DNA, 33 bp, Homo sapiens
ttatcttagtttaccactgagaggcatctgttc

SEQ ID NO: 41078 - DNA, 33 bp, Homo sapiens
caatgtatgaaaatgccatttccctgaaactat

SEQ ID NO: 41079 - DNA, 33 bp, Homo sapiens
agaatgtcaaattccacctacctccatgttcat

SEQ ID NO: 41080 - DNA, 33 bp, Homo sapiens
ccaattgttggccttcaacaccaggggcaggga

SEQ ID NO: 41081 - DNA, 33 bp, Homo sapiens
gcagaaaaggaatcgggagtcaaggaggctgga

SEQ ID NO: 41082 - DNA, 33 bp, Homo sapiens
agaaacacaagcaggaaaggatgaaatcagccg

SEQ ID NO: 41083 - DNA, 33 bp, Homo sapiens
attagaggagcccaaactaaggcaatagcaaga

SEQ ID NO: 41084 - DNA, 33 bp, Homo sapiens
gaatgtgacatggttccccgccctcaaagaatt

SEQ ID NO: 41085 - DNA, 33 bp, Homo sapiens
gactcaaaggtaactcacgagaatactagtttc

SEQ ID NO: 41086 - DNA, 33 bp, Homo sapiens
tgaacctggtagcatacgcatctcatgatgaca

SEQ ID NO: 41087 - DNA, 33 bp, Homo sapiens
gctttaagagacactaccaaatcgtttgtgaga

SEQ ID NO: 41088 - DNA, 33 bp, Homo sapiens
gattgcaaagtcctaccaaccagaaacgtgcaa

SEQ ID NO: 41089 - DNA, 33 bp, Homo sapiens
aaaaaaaaaaaaaatcaatgattgccaggagta

SEQ ID NO: 41090 - DNA, 33 bp, Homo sapiens
tgcaaaagttgagctacgattgttatgaacctc

SEQ ID NO: 41091 - DNA, 33 bp, Homo sapiens
caacaagcatttgtaaagagaaccagttagcaa

SEQ ID NO: 41092 - DNA, 33 bp, Homo sapiens
tcagagtcttagagatagtatcccaggtgactt

SEQ ID NO: 41093 - DNA, 33 bp, Homo sapiens
ttaatcctcacccttcacagtccagaggctgcc

SEQ ID NO: 41094 - DNA, 33 bp, Homo sapiens
ttaaattgttcattgacgtcccaaacctgaagc

SEQ ID NO: 41095 - DNA, 33 bp, Homo sapiens
accttaactccactgaagatcatgaacaatgct

SEQ ID NO: 41096 - DNA, 33 bp, Homo sapiens
tttgaccaatacgtacccttaatcggccatctg

SEQ ID NO: 41097 - DNA, 33 bp, Homo sapiens
tactcattttagctcaactatggtttctaaaac

SEQ ID NO: 41098 - DNA, 33 bp, Homo sapiens
ctcacaatttttctaccatccatatgttaatga

SEQ ID NO: 41099 - DNA, 33 bp, Homo sapiens
ctttgcgtgctggaacaaccacgaaactgagca

SEQ ID NO: 41100 - DNA, 33 bp, Homo sapiens
ctcaggtggtcctcaccagaatctgacaggcag

SEQ ID NO: 41101 - DNA, 33 bp, Homo sapiens
ggccaaaatgccatccaatagcctcatttatct

SEQ ID NO: 41102 - DNA, 33 bp, Homo sapiens
ctgaatcgcatctgaactacatgcccaggattg

SEQ ID NO: 41103 - DNA, 33 bp, Homo sapiens
ttttagtgatgtgtcaacgcacaatgaggaaaa

SEQ ID NO: 41104 - DNA, 33 bp, Homo sapiens
tgatggaacatcgcaaatccagctcggaggaat

SEQ ID NO: 41105 - DNA, 33 bp, Homo sapiens
agtcttttggaaagatgaaggaaatgatcagaa

SEQ ID NO: 41106 - DNA, 33 bp, Homo sapiens
gagactctgtgagcaaatgacttcctaatactt

SEQ ID NO: 41107 - DNA, 33 bp, Homo sapiens
gatggacattcaattcaataagcccagcgtgtg

SEQ ID NO: 41108 - DNA, 33 bp, Homo sapiens
tctacgaaacgcttcgcatatgttacctcattt

SEQ ID NO: 41109 - DNA, 33 bp, Homo sapiens
ctgcaaatggtgaagaaagaagaggctagccta

SEQ ID NO: 41110 - DNA, 51 bp, Homo sapiens
ggcataaccttgacattgctctcaaccctgaatttcttctttttgagcatg

SEQ ID NO: 41111 - DNA, 33 bp, Homo sapiens
gttcttgcctcacagaaaggaatagtatccagt

SEQ ID NO: 41112 - DNA, 33 bp, Homo sapiens
tcctggcccagcggctaagatacctgacctgtt

SEQ ID NO: 41113 - DNA, 33 bp, Homo sapiens
caaattaacccaagtcaatacctgtgcagttcc

SEQ ID NO: 41114 - DNA, 33 bp, Homo sapiens
acactaccatctctcacgtgtttttgagccaaa

SEQ ID NO: 41115 - DNA, 33 bp, Homo sapiens
acctgagatgtttgagaaagttactcaattttc

SEQ ID NO: 41116 - DNA, 51 bp, Homo sapiens
gagaacaacttgacacatctatttccagccagagcagcagtgactggcagg

SEQ ID NO: 41117 - DNA, 33 bp, Homo sapiens
tgaaatgtgattttcacaaaactagtattttca

SEQ ID NO: 41118 - DNA, 51 bp, Homo sapiens
tttgggttgagttgcctatctgtctaaaagcattaggaacttcattgcttg

SEQ ID NO: 41119 - DNA, 33 bp, Homo sapiens
aggatgttatgttggcactccttctatcctagt

SEQ ID NO: 41120 - DNA, 33 bp, Homo sapiens
attcacgtagtgcttaaaatgctgcttctacca

SEQ ID NO: 41121 - DNA, 33 bp, Homo sapiens
cccacctcttaacaccaacacattagagattaa

SEQ ID NO: 41122 - DNA, 33 bp, Homo sapiens
tgtaccccttctgttacgaccaatagcctaatc

SEQ ID NO: 41123 - DNA, 33 bp, Homo sapiens
gtctcaaaagctgtcactccttcaggtacctga

SEQ ID NO: 41124 - DNA, 33 bp, Homo sapiens
tttgataagaatatcacggaatctgtaaattgc

SEQ ID NO: 41125 - DNA, 33 bp, Homo sapiens
acatccatgcacatgaacacttttctaataatt

SEQ ID NO: 41126 - DNA, 33 bp, Homo sapiens
tgggaggagagcgctacggatacatactttgtc

SEQ ID NO: 41127 - DNA, 33 bp, Homo sapiens
atcttcttcacagagcagaacatattcacacca

SEQ ID NO: 41128 - DNA, 33 bp, Homo sapiens
catccaccattacatcaaaaactttgggaaacc

SEQ ID NO: 41129 - DNA, 33 bp, Homo sapiens
gaagacttgagacaaaattaatgagtgttaaag

SEQ ID NO: 41130 - DNA, 33 bp, Homo sapiens
gtggccactatgcttcacttgttttacgtttat

SEQ ID NO: 41131 - DNA, 33 bp, Homo sapiens
ctatttaatcaactaaactcagttcccaatatg

SEQ ID NO: 41132 - DNA, 33 bp, Homo sapiens
agaccacccttcagaaatggacaatttgatcgg

SEQ ID NO: 41133 - DNA, 33 bp, Homo sapiens
gtgtgtagtatttcaacagcttttgaggtgtaa

SEQ ID NO: 41134 - DNA, 33 bp, Homo sapiens
tccccgttcatccatccaagaccacagtggtaa

SEQ ID NO: 41135 - DNA, 33 bp, Homo sapiens
atttgataataggtgaagctagtttgcagattg

SEQ ID NO: 41136 - DNA, 33 bp, Homo sapiens
cgctagactattctacactctatagaaacaaat

SEQ ID NO: 41137 - DNA, 33 bp, Homo sapiens
tggtgagttttagcaaaatttggatataagaga

SEQ ID NO: 41138 - DNA, 33 bp, Homo sapiens
taacaggacactctccagatttggacccagaac

SEQ ID NO: 41139 - DNA, 33 bp, Homo sapiens
taatcttagaccaaaaagaacctctggggtgat

SEQ ID NO: 41140 - DNA, 33 bp, Homo sapiens
aataacaaaatggaaactaaaatcagcacctac

SEQ ID NO: 41141 - DNA, 33 bp, Homo sapiens
ggaattgctgggccataagataactatatgttt

SEQ ID NO: 41142 - DNA, 33 bp, Homo sapiens
ctgctaatgaggtttaacaatattctcataagc

SEQ ID NO: 41143 - DNA, 33 bp, Homo sapiens
ccttccgaatagacgcaatctcttgaggggaga

SEQ ID NO: 41144 - DNA, 33 bp, Homo sapiens
acatggtttaggaaataaaaatctgtttctaat

SEQ ID NO: 41145 - DNA, 33 bp, Homo sapiens
catggaatcacattacagaaaatcatcagaggc

SEQ ID NO: 41146 - DNA, 33 bp, Homo sapiens
gataacaggaatttgacggttagtgatggtaac

SEQ ID NO: 41147 - DNA, 33 bp, Homo sapiens
gacactttctttagcccgagcacatttttaact

SEQ ID NO: 41148 - DNA, 51 bp, Homo sapiens
tccttagctcctcataactaaagcaaagtcagcctcgaccagagaagaggt

SEQ ID NO: 41149 - DNA, 33 bp, Homo sapiens
gttgaatctgttcatcaatttgggaaatattgc

SEQ ID NO: 41150 - DNA, 51 bp, Homo sapiens
aaggattgatgcattcatttttttcacttatttggtgctttcaaaaccaat

SEQ ID NO: 41151 - DNA, 33 bp, Homo sapiens
aggcaatctaatgtagcatctctgtaccgtaaa

SEQ ID NO: 41152 - DNA, 33 bp, Homo sapiens
tctaatattgaaagtaggaactgtctggatcta

SEQ ID NO: 41153 - DNA, 33 bp, Homo sapiens
caaggactgttttttcaactttcattaaaatcc

SEQ ID NO: 41154 - DNA, 33 bp, Homo sapiens
attgtcacaatgtgtacaatcaagtgggacaag

SEQ ID NO: 41155 - DNA, 33 bp, Homo sapiens
attgtggtagcctttacatgactatacacttgt

SEQ ID NO: 41156 - DNA, 33 bp, Homo sapiens
ctgtagtgatttagcacgggtgtttgtctttca

SEQ ID NO: 41157 - DNA, 33 bp, Homo sapiens
agagccatttgcaaagaaaatagatacaaatat

SEQ ID NO: 41158 - DNA, 33 bp, Homo sapiens
atggagcacaaaggaaatctcataaccagttag

SEQ ID NO: 41159 - DNA, 33 bp, Homo sapiens
attgactttcccataaatgtgtggttttgagtg

SEQ ID NO: 41160 - DNA, 33 bp, Homo sapiens
catatgggcatgatgcggagttttgatgatcca

SEQ ID NO: 41161 - DNA, 33 bp, Homo sapiens
aatgcataatgaaaaactgagtaatacattagt

SEQ ID NO: 41162 - DNA, 33 bp, Homo sapiens
tggcagtactggctacagatcttgggtaatcca

SEQ ID NO: 41163 - DNA, 33 bp, Homo sapiens
tcactcaggaggaatacagatgagcggtttatt

SEQ ID NO: 41164 - DNA, 33 bp, Homo sapiens
cttactttcagcaatgaacagagcatccagaca

SEQ ID NO: 41165 - DNA, 51 bp, Homo sapiens
acaaatggctagcacatagtacgtgaatatagccttacttccaaagtgaca

SEQ ID NO: 41166 - DNA, 33 bp, Homo sapiens
acaacatttttaagcacgggccttagtgataaa

SEQ ID NO: 41167 - DNA, 51 bp, Homo sapiens
aaaagagttaatagagatggaaagaccaatagaagatgctaacaagaaggt

SEQ ID NO: 41168 - DNA, 51 bp, Homo sapiens
gacaaacaatcaattatagccataaacttagtgtaaagaattataatataa

SEQ ID NO: 41169 - DNA, 51 bp, Homo sapiens
tattcagtctgaaaaaatgatacacaaccctattagccactcaactttggc

SEQ ID NO: 41170 - DNA, 51 bp, Homo sapiens
aatttaactgggcacatttatcctgcatatttcgtggcaaagttaactaaa

SEQ ID NO: 41171 - DNA, 33 bp, Homo sapiens
gttgttatttttagcacagatgtagactacatt

SEQ ID NO: 41172 - DNA, 33 bp, Homo sapiens
ggaagaactcacttccaatttgacacagttttg

SEQ ID NO: 41173 - DNA, 33 bp, Homo sapiens
actctattaacacacactgggctgttgatgatc

SEQ ID NO: 41174 - DNA, 33 bp, Homo sapiens
ttatgtgaatttattacggcaatcctagaaaac

SEQ ID NO: 41175 - DNA, 33 bp, Homo sapiens
tgttttgtgaggtcttaaaagcgaaatatttgg

SEQ ID NO: 41176 - DNA, 33 bp, Homo sapiens
tattttttcatgctgaccctgtgtaagtctttg

SEQ ID NO: 41177 - DNA, 33 bp, Homo sapiens
ctctgcatatagcataaggagcacagtgcagct

SEQ ID NO: 41178 - DNA, 33 bp, Homo sapiens
gcagacaaaaatgccacagaattcaagcaagaa

SEQ ID NO: 41179 - DNA, 33 bp, Homo sapiens
gtgagaacggtcactaaaaaatttcccacaaac

SEQ ID NO: 41180 - DNA, 33 bp, Homo sapiens
agaaaaaactctgaaaatgctgtaaaaagccct

SEQ ID NO: 41181 - DNA, 33 bp, Homo sapiens
aggctcagtgtcattcaaggcaattatttcaaa

SEQ ID NO: 41182 - DNA, 33 bp, Homo sapiens
actaagttctattgcccctgggactaagttcaa

SEQ ID NO: 41183 - DNA, 33 bp, Homo sapiens
cctcatcttgaaccaccctttcccttaatgtgc

SEQ ID NO: 41184 - DNA, 33 bp, Homo sapiens
caccttgaattgtaataatcctaacgtgtcatg

SEQ ID NO: 41185 - DNA, 51 bp, Homo sapiens
gcctctgtggacttgagagatgaccaaatagcaaagaaagtattcataagg

SEQ ID NO: 41186 - DNA, 33 bp, Homo sapiens
tatataaaatgagatccaaccacttatacagat

SEQ ID NO: 41187 - DNA, 33 bp, Homo sapiens
gatgtaacttgaccacactaaagtagatcagag

SEQ ID NO: 41188 - DNA, 33 bp, Homo sapiens
ggtgagtggatgaggcaaacatcttcccaggtc

SEQ ID NO: 41189 - DNA, 33 bp, Homo sapiens
agactatattatctaaactcgccaaacctcaat

SEQ ID NO: 41190 - DNA, 33 bp, Homo sapiens
cagacagtacaaataaaaaacgaacacaacttc

SEQ ID NO: 41191 - DNA, 33 bp, Homo sapiens
tgtgcatgattgaggactatctctgtgttaatt

SEQ ID NO: 41192 - DNA, 33 bp, Homo sapiens
gaatgagtggattcacaaaagtctatataaacc

SEQ ID NO: 41193 - DNA, 33 bp, Homo sapiens
agtcattgcaaaatcaatactcctaccctgaat

SEQ ID NO: 41194 - DNA, 33 bp, Homo sapiens
tctatttcttgttgccaccaataccatgatcga

SEQ ID NO: 41195 - DNA, 33 bp, Homo sapiens
ctcattgtggtttggaataccctaatgactaat

SEQ ID NO: 41196 - DNA, 33 bp, Homo sapiens
ccccttggcagtattacggtggctctgtcccag

SEQ ID NO: 41197 - DNA, 33 bp, Homo sapiens
ccaagtcattaaagcaaagccggatagttgaaa

SEQ ID NO: 41198 - DNA, 33 bp, Homo sapiens
attgtctattgtcttccatgttcccatgcctag

SEQ ID NO: 41199 - DNA, 33 bp, Homo sapiens
taactgaacaatacaaacccagatggattgggt

SEQ ID NO: 41200 - DNA, 33 bp, Homo sapiens
cacaacagtactaaaacggtaggtagatattat

SEQ ID NO: 41201 - DNA, 33 bp, Homo sapiens
gtcagtctttccattacgtagctaaagcaacta

SEQ ID NO: 41202 - DNA, 33 bp, Homo sapiens
ttctgtctttggatgcacctaactgctcagaag

SEQ ID NO: 41203 - DNA, 33 bp, Homo sapiens
ggtttcatttagagcagtaataaatacctggca

SEQ ID NO: 41204 - DNA, 33 bp, Homo sapiens
tgtgcgtcagttctagcaatgccaaaaagagga

SEQ ID NO: 41205 - DNA, 33 bp, Homo sapiens
taccaaaacctgcatccgaaataacttctaaga

SEQ ID NO: 41206 - DNA, 51 bp, Homo sapiens
agaatgatgttcaccaatagctaggcatgattaatattgagtaaagatttg

SEQ ID NO: 41207 - DNA, 51 bp, Homo sapiens
ttgttttaaatgttatcttagtgtcccattggtctgaggtttttcctcttg

SEQ ID NO: 41208 - DNA, 51 bp, Homo sapiens
actttatccttccagccgcaactcaaatgacccaaagtcagacatcacatc

SEQ ID NO: 41209 - DNA, 33 bp, Homo sapiens
agtaatctgtttaaagacaaattggatccttta

SEQ ID NO: 41210 - DNA, 33 bp, Homo sapiens
cccattatcgataagcacctggtttgatttcat

SEQ ID NO: 41211 - DNA, 33 bp, Homo sapiens
gtaaacaatgataaacacaagaaacgatctcat

SEQ ID NO: 41212 - DNA, 33 bp, Homo sapiens
aaagcactgttacatacagaaatccctccaaaa

SEQ ID NO: 41213 - DNA, 33 bp, Homo sapiens
cacatttattctaaaccacacatgaaccgagaa

SEQ ID NO: 41214 - DNA, 33 bp, Homo sapiens
aatttcagaaaagcataagtgctagacctcctt

SEQ ID NO: 41215 - DNA, 33 bp, Homo sapiens
tatattattgaatgacaaatcactttcataaac

SEQ ID NO: 41216 - DNA, 33 bp, Homo sapiens
gctgcatttcatgtcactcgttctttcactcat

SEQ ID NO: 41217 - DNA, 33 bp, Homo sapiens
ttgtctttccatgatagcaataacttttaacat

SEQ ID NO: 41218 - DNA, 33 bp, Homo sapiens
ttgtgtagatatttaagggctcaattttgaatc

SEQ ID NO: 41219 - DNA, 33 bp, Homo sapiens
atgtgttgatttctcacgtcaatactttactac

SEQ ID NO: 41220 - DNA, 33 bp, Homo sapiens
gaataagtgagtcgtagccatgttattctgaaa

SEQ ID NO: 41221 - DNA, 33 bp, Homo sapiens
aagtagcatggaaaaacttgtttatgtgaaaat

SEQ ID NO: 41222 - DNA, 51 bp, Homo sapiens
ttcattggtgagggtatttaaagaccgagtagcttaatatttaaccacaag

SEQ ID NO: 41223 - DNA, 51 bp, Homo sapiens
atttattgaatactgtatattatgtcaaaattgtgatgattttgtaccagg

SEQ ID NO: 41224 - DNA, 33 bp, Homo sapiens
aggtctttagacgtagaaatcagaatgatataa

SEQ ID NO: 41225 - DNA, 33 bp, Homo sapiens
ttctaggtgaagtggcaagacagaatggggctg

SEQ ID NO: 41226 - DNA, 51 bp, Homo sapiens
aagccccactgaagtaattggtagaaaatgagtaacatgataaacacctgg

SEQ ID NO: 41227 - DNA, 33 bp, Homo sapiens
tggttccagactttggcaacaactgaaatatcc

SEQ ID NO: 41228 - DNA, 33 bp, Homo sapiens
gtaacttagactaaaactgttgtccacaagatt

SEQ ID NO: 41229 - DNA, 33 bp, Homo sapiens
tggacttccatgtgagcatttatctccctacgt

SEQ ID NO: 41230 - DNA, 51 bp, Homo sapiens
cccatatctaatcttgttttatccacattgtattctattattgcttaactg

SEQ ID NO: 41231 - DNA, 33 bp, Homo sapiens
tggaatttcaacccataaatttaactcaattat

SEQ ID NO: 41232 - DNA, 33 bp, Homo sapiens
cattatattcaagctcacctgccattagccaaa

SEQ ID NO: 41233 - DNA, 33 bp, Homo sapiens
atcatacctatttcaaaactgtgtaaaacaagt

SEQ ID NO: 41234 - DNA, 33 bp, Homo sapiens
ccaggtgaatgtcaaaacacctacatgtagaac

SEQ ID NO: 41235 - DNA, 33 bp, Homo sapiens
attattgaatgccatgaatatagtaataggagg

SEQ ID NO: 41236 - DNA, 33 bp, Homo sapiens
tttgttttgtgtttaactatagtcaccatgctg

SEQ ID NO: 41237 - DNA, 33 bp, Homo sapiens
cttctactctacagccagatttatttcagaaga

SEQ ID NO: 41238 - DNA, 33 bp, Homo sapiens
ttgaactaatttgcacgcttagcaacagtgtaa

SEQ ID NO: 41239 - DNA, 51 bp, Homo sapiens
tgcaaacaatttgtttttggcattgaatgtaaagactatcatcatttactt

SEQ ID NO: 41240 - DNA, 51 bp, Homo sapiens
caatttgatgttctgtgtagaagacaattggtgaaggcttctattcagcca

SEQ ID NO: 41241 - DNA, 51 bp, Homo sapiens
ccactgagcacatagcattatgacagaactattcctgagacatggggagat

SEQ ID NO: 41242 - DNA, 33 bp, Homo sapiens
actttatagaacataactattgcatataacaag

SEQ ID NO: 41243 - DNA, 33 bp, Homo sapiens
tgtgtattctgaaacaccaattatctggagaga

SEQ ID NO: 41244 - DNA, 33 bp, Homo sapiens
tccttacattcttgaaatatatccatgtaacca

SEQ ID NO: 41245 - DNA, 33 bp, Homo sapiens
gagaaattggaaaaaaactgtgtcatatgctta

SEQ ID NO: 41246 - DNA, 33 bp, Homo sapiens
tgctgatgagattcaaactatgagaaggcattt

SEQ ID NO: 41247 - DNA, 33 bp, Homo sapiens
tgatccatcatgagaggcagtaatgtgttttcc

SEQ ID NO: 41248 - DNA, 33 bp, Homo sapiens
agacttaacacttttcacgtgggcaaagagagt

SEQ ID NO: 41249 - DNA, 33 bp, Homo sapiens
agttgctctgcattagacaatgtgtggtaactt

SEQ ID NO: 41250 - DNA, 33 bp, Homo sapiens
aaactatattgtttgggagggtaacagcgaatg

SEQ ID NO: 41251 - DNA, 33 bp, Homo sapiens
aattctctcaaactttcaaacagcttgcctttt

SEQ ID NO: 41252 - DNA, 51 bp, Homo sapiens
ttactctcaggagtgttcatgccaacacagagtggttttttgacacagttt

SEQ ID NO: 41253 - DNA, 51 bp, Homo sapiens
gtggaaaggaatagtgatcaatacccacatgaactaacttataacacagtg

SEQ ID NO: 41254 - DNA, 33 bp, Homo sapiens
ccaggattcaaatgtaacaatgcaaagttattt

SEQ ID NO: 41255 - DNA, 33 bp, Homo sapiens
cctgttggcttcctaactcatggacaaaatcaa

SEQ ID NO: 41256 - DNA, 33 bp, Homo sapiens
tttgctcattgtcttccaaacataaaattgctc

SEQ ID NO: 41257 - DNA, 33 bp, Homo sapiens
atgacaaaacttaatacgtcctactgtaattga

SEQ ID NO: 41258 - DNA, 33 bp, Homo sapiens
acaaaatctgctgacacgagtacatagcactag

SEQ ID NO: 41259 - DNA, 33 bp, Homo sapiens
acatagcactagaaaacaagctttctgacaccc

SEQ ID NO: 41260 - DNA, 51 bp, Homo sapiens
ctttgatgaaagtggccaaattttaacataacagaatgaaaaatagtcatt

SEQ ID NO: 41261 - DNA, 33 bp, Homo sapiens
tccatataacatgctcagagactctacatataa

SEQ ID NO: 41262 - DNA, 33 bp, Homo sapiens
cctatattatgaagtgaaaaaccagtcttttga

SEQ ID NO: 41263 - DNA, 33 bp, Homo sapiens
aatagctattctgatcaatgttaaatggtaact

SEQ ID NO: 41264 - DNA, 33 bp, Homo sapiens
gattcaatttcccaagcaacaataacagactat

SEQ ID NO: 41265 - DNA, 33 bp, Homo sapiens
tagggaaccgaaatcacctgctactgtgatgtt

SEQ ID NO: 41266 - DNA, 33 bp, Homo sapiens
tattgatttccacccaataagtatgactcaaga

SEQ ID NO: 41267 - DNA, 33 bp, Homo sapiens
cttacgcaggcatcggaccaacccacctgaaga

SEQ ID NO: 41268 - DNA, 51 bp, Homo sapiens
taaaagaatctattaatgggccctaaaaaattagctatgtacattattttc

SEQ ID NO: 41269 - DNA, 51 bp, Homo sapiens
tttctttgcatttagttaataatctcaacattcattgatacataagagtat

SEQ ID NO: 41270 - DNA, 51 bp, Homo sapiens
tcactttatcatgaagctattgggaagttatataagataaaagctgtatga

SEQ ID NO: 41271 - DNA, 33 bp, Homo sapiens
accctaattagttaaaagagccatcaaaatact

SEQ ID NO: 41272 - DNA, 33 bp, Homo sapiens
tttcgtctctgacaacactaatgacttcatcta

SEQ ID NO: 41273 - DNA, 33 bp, Homo sapiens
gcaagaaaggatgatccagaaacttactgtaaa

SEQ ID NO: 41274 - DNA, 33 bp, Homo sapiens
acaaacaagaaaagaagtgtgaacctcttgtac

SEQ ID NO: 41275 - DNA, 33 bp, Homo sapiens
ttatcaaaggtgccgacaatatacaatggggag

SEQ ID NO: 41276 - DNA, 33 bp, Homo sapiens
ataacattaagagaacaaagtcctgtactccag

SEQ ID NO: 41277 - DNA, 33 bp, Homo sapiens
aacaaaagcatgaaaactgaatatgttgaaatg

SEQ ID NO: 41278 - DNA, 33 bp, Homo sapiens
ataaagcaagcttccactatccatacagagctt

SEQ ID NO: 41279 - DNA, 33 bp, Homo sapiens
tacatgaaactctcaaacagactgacacacatt

SEQ ID NO: 41280 - DNA, 33 bp, Homo sapiens
taccaaatggatggaagaatgaaataactgatt

SEQ ID NO: 41281 - DNA, 33 bp, Homo sapiens
taggtattgtcttttacgtcaaccatttacttt

SEQ ID NO: 41282 - DNA, 33 bp, Homo sapiens
aaaccctttgaccatgaagacttgaacaatcac

SEQ ID NO: 41283 - DNA, 33 bp, Homo sapiens
atgtttaacatttcaaaggtgcataatccaact

SEQ ID NO: 41284 - DNA, 33 bp, Homo sapiens
tgtttgttttgcaatactacctcaatttaaatt

SEQ ID NO: 41285 - DNA, 33 bp, Homo sapiens
cagtggtgtataattacgagaaaattctatttt

SEQ ID NO: 41286 - DNA, 33 bp, Homo sapiens
cctgccataaacttcggcacacaatggagtcta

SEQ ID NO: 41287 - DNA, 33 bp, Homo sapiens
tttagccaggctttccactctcacctccaaata

SEQ ID NO: 41288 - DNA, 33 bp, Homo sapiens
agaataaggactgagacgatctggcaatgaaga

SEQ ID NO: 41289 - DNA, 33 bp, Homo sapiens
ttgactcagtttctcacctctaagttgagttga

SEQ ID NO: 41290 - DNA, 33 bp, Homo sapiens
cgtcacttcctagtccagataaccagatccagt

SEQ ID NO: 41291 - DNA, 33 bp, Homo sapiens
aggcacgacctggaaagctcaattaaaatcaca

SEQ ID NO: 41292 - DNA, 51 bp, Homo sapiens
cttactctgtctaaaaggaagtttacatttatgaggacaaaggagatggat

SEQ ID NO: 41293 - DNA, 51 bp, Homo sapiens
aaataaataaatctaacttaagatgcaattttgagggtcttgctttgggtt

SEQ ID NO: 41294 - DNA, 33 bp, Homo sapiens
aaatgaatcaataatccgagctaggaagtttag

SEQ ID NO: 41295 - DNA, 33 bp, Homo sapiens
gctaggaagaggtgctcacactcagctcactgg

SEQ ID NO: 41296 - DNA, 33 bp, Homo sapiens
tgaacaacacagaataaatactcataccttttt

SEQ ID NO: 41297 - DNA, 33 bp, Homo sapiens
ttctcagaatccttccagcatccagtataagtg

SEQ ID NO: 41298 - DNA, 33 bp, Homo sapiens
tgtttaaagtgatggaaaatagacagatggaaa

SEQ ID NO: 41299 - DNA, 33 bp, Homo sapiens
attgttccttggagaccagtgacattgataggg

SEQ ID NO: 41300 - DNA, 33 bp, Homo sapiens
ctgcatgttcagacaaagagtggttgaggaaga

SEQ ID NO: 41301 - DNA, 33 bp, Homo sapiens
ctggtatctggatgagaatggcaaccgctcttc

SEQ ID NO: 41302 - DNA, 33 bp, Homo sapiens
ccagaagacacgtgacaggggttctcagtataa

SEQ ID NO: 41303 - DNA, 33 bp, Homo sapiens
aggtgccaagccataaacttcagtgtaattcac

SEQ ID NO: 41304 - DNA, 33 bp, Homo sapiens
cctcaagggctggcaacgtagagggctctgaac

SEQ ID NO: 41305 - DNA, 33 bp, Homo sapiens
caatccaacacagtaggtttcactatcaccatt

SEQ ID NO: 41306 - DNA, 33 bp, Homo sapiens
cacctgactgtgctaaaactagagcctatttct

SEQ ID NO: 41307 - DNA, 33 bp, Homo sapiens
gtgactatcctactaaatatcttactcaacgaa

SEQ ID NO: 41308 - DNA, 51 bp, Homo sapiens
cttaaacttatttatgaaatcgtcccaattgatgtaaagagccatttattg

SEQ ID NO: 41309 - DNA, 33 bp, Homo sapiens
gtccttctgaatatcgaatagagaaggaaacca

SEQ ID NO: 41310 - DNA, 33 bp, Homo sapiens
gcaatagctagataacaagcatacatacccaca

SEQ ID NO: 41311 - DNA, 33 bp, Homo sapiens
gaataaaaatgcaagaaagatctgtcttagcct

SEQ ID NO: 41312 - DNA, 33 bp, Homo sapiens
atgatgtagtatagaaatgggaaaataggctct

SEQ ID NO: 41313 - DNA, 33 bp, Homo sapiens
tttccctggttgatgaagtgttaggtacgttag

SEQ ID NO: 41314 - DNA, 33 bp, Homo sapiens
cactctccacataaaaatattcaaataggctgg

SEQ ID NO: 41315 - DNA, 51 bp, Homo sapiens
agttgttgaaggaatggtgatataccggctgacacaagtctttacttactg

SEQ ID NO: 41316 - DNA, 51 bp, Homo sapiens
aatttgatccttttaagctgtgttacgtaggccggtactgcattcagtcta

SEQ ID NO: 41317 - DNA, 51 bp, Homo sapiens
gagtccccaagctggaaattgttaactattgaccaaattagaaataaatat

SEQ ID NO: 41318 - DNA, 51 bp, Homo sapiens
cttaattcaattttcttcagtcctagaatagtcagcacatgcagttatttt

SEQ ID NO: 41319 - DNA, 33 bp, Homo sapiens
aactcatgtatttgtacgggtggtgtattagtc

SEQ ID NO: 41320 - DNA, 33 bp, Homo sapiens
cttgatctctactttaccgatgagaaaataagg

SEQ ID NO: 41321 - DNA, 51 bp, Homo sapiens
agtaatactaccttagatgtgaaaacactaatattagcaccagacttcagg

SEQ ID NO: 41322 - DNA, 33 bp, Homo sapiens
ggtgctgccaaaattccagttattggaccaaaa

SEQ ID NO: 41323 - DNA, 33 bp, Homo sapiens
gaataaggagaatgtaagcacaaagaacaagat

SEQ ID NO: 41324 - DNA, 33 bp, Homo sapiens
aactggctcataaatcgatagtcatgagaaatt

SEQ ID NO: 41325 - DNA, 33 bp, Homo sapiens
ttgggacctcaagaagaagatattgaatgggat

SEQ ID NO: 41326 - DNA, 33 bp, Homo sapiens
gtatgatggacccagaacttaaattttgttagt

SEQ ID NO: 41327 - DNA, 33 bp, Homo sapiens
ctaagacatcagctaaagaaagtatatgacacg

SEQ ID NO: 41328 - DNA, 33 bp, Homo sapiens
aaattatttctccaaaaaaagacagggtgtatc

SEQ ID NO: 41329 - DNA, 33 bp, Homo sapiens
ctattataattgaatacggtcacgtgccacata

SEQ ID NO: 41330 - DNA, 33 bp, Homo sapiens
ggtcagtaatgtgttacgctttgacattatcat

SEQ ID NO: 41331 - DNA, 33 bp, Homo sapiens
ttgacctcagtgactaaaacaggagaagacgtc

SEQ ID NO: 41332 - DNA, 33 bp, Homo sapiens
atgtgactcaatggtcccaagatactgccagtc

SEQ ID NO: 41333 - DNA, 33 bp, Homo sapiens
gaccagtggtttcagcaataagctgatgtagcc

SEQ ID NO: 41334 - DNA, 33 bp, Homo sapiens
cctaatcttttgctaactggacttttccatata

SEQ ID NO: 41335 - DNA, 51 bp, Homo sapiens
gttgcactattcatattttataagaccgaatcatactcagttttgtttcct

SEQ ID NO: 41336 - DNA, 33 bp, Homo sapiens
ctttccattttggataaatctcttcacacctac

SEQ ID NO: 41337 - DNA, 33 bp, Homo sapiens
ccaatagaagtaatacaacaggttcagaatcca

SEQ ID NO: 41338 - DNA, 33 bp, Homo sapiens
gcttgagtctttgatacaggggtgacagagata

SEQ ID NO: 41339 - DNA, 33 bp, Homo sapiens
gagaggcaaaaagagaagaattcaaccttgaac

SEQ ID NO: 41340 - DNA, 33 bp, Homo sapiens
tgcattattgtctccaaatattccaaaccctcc

SEQ ID NO: 41341 - DNA, 33 bp, Homo sapiens
attcccttagggagaacaaccaaagatgctgct

SEQ ID NO: 41342 - DNA, 33 bp, Homo sapiens
atttgttcttgaattccaggccaaccagggtcc

SEQ ID NO: 41343 - DNA, 33 bp, Homo sapiens
taggtccacacttgacagtacactctcatgagg

SEQ ID NO: 41344 - DNA, 33 bp, Homo sapiens
attctgacgagtaatcaacacagttggggaggg

SEQ ID NO: 41345 - DNA, 33 bp, Homo sapiens
tgcagaggacacagaaatgtttaggacatggac

SEQ ID NO: 41346 - DNA, 33 bp, Homo sapiens
gtcttagcaacagaaaactcttagatagtaggc

SEQ ID NO: 41347 - DNA, 33 bp, Homo sapiens
gttcctggtcccactgcaggttctggccatgcc

SEQ ID NO: 41348 - DNA, 33 bp, Homo sapiens
cccccttttcgtgggacgagagcagagggagat

SEQ ID NO: 41349 - DNA, 33 bp, Homo sapiens
ttacagttaaaaaacggcagcctggactaagag

SEQ ID NO: 41350 - DNA, 33 bp, Homo sapiens
tctgtcaagaaacaacaacgacgtcacatttat

SEQ ID NO: 41351 - DNA, 33 bp, Homo sapiens
cctgtcaaaaaaaagaagcactcaattctgttt

SEQ ID NO: 41352 - DNA, 51 bp, Homo sapiens
ttttctctccctggcagtgtgtacaaaagcgaagactacaggctgaaattc

SEQ ID NO: 41353 - DNA, 51 bp, Homo sapiens
ttagtctttctagggatgactactaaaactccaaatagtatggccttattt

SEQ ID NO: 41354 - DNA, 51 bp, Homo sapiens
ctcttaagggtagagatttcaaagacgtaactttcaccaacaacagatggg

SEQ ID NO: 41355 - DNA, 51 bp, Homo sapiens
ccagagttccagtctggtaaatcatcagcttttaggtggtcttcaagtcca

SEQ ID NO: 41356 - DNA, 33 bp, Homo sapiens
ttctgactttgaggtacgctactaggctgatta

SEQ ID NO: 41357 - DNA, 33 bp, Homo sapiens
agtcctacactaaatccagtctcatacccttgc

SEQ ID NO: 41358 - DNA, 33 bp, Homo sapiens
agaaatagccttctaaaacagcactaataaaaa

SEQ ID NO: 41359 - DNA, 33 bp, Homo sapiens
tatcaggaataaggacagagtttcaaagaacat

SEQ ID NO: 41360 - DNA, 33 bp, Homo sapiens
cactcacaactcattagcacagccttgatccca

SEQ ID NO: 41361 - DNA, 33 bp, Homo sapiens
ctcttgataattccacactcctaaggcatcagg

SEQ ID NO: 41362 - DNA, 33 bp, Homo sapiens
ttaatagtgcaatctcaacaagtgcgtatgagt

SEQ ID NO: 41363 - DNA, 33 bp, Homo sapiens
cccctcatttagtagacgcttgctaaatattat

SEQ ID NO: 41364 - DNA, 33 bp, Homo sapiens
tctccactggaaaaagaataaatgtcttctaag

SEQ ID NO: 41365 - DNA, 33 bp, Homo sapiens
aggggataagggtacaacatttcagagaggagg

SEQ ID NO: 41366 - DNA, 33 bp, Homo sapiens
tttgagagttgtcaaaatatatgttacttaagg

SEQ ID NO: 41367 - DNA, 33 bp, Homo sapiens
aaactggcacataaacactagatcttcaactga

SEQ ID NO: 41368 - DNA, 33 bp, Homo sapiens
tacaattcaaggtaaacgtgtaaatggaaattt

SEQ ID NO: 41369 - DNA, 33 bp, Homo sapiens
catactcaatagttaacagactgcattttgcat

SEQ ID NO: 41370 - DNA, 33 bp, Homo sapiens
aagtagttttagcagaacaaagaagtcaagttc

SEQ ID NO: 41371 - DNA, 33 bp, Homo sapiens
taatgaatagaactaaataatcatctccttaca

SEQ ID NO: 41372 - DNA, 33 bp, Homo sapiens
agtgcaagtttattgactacctacaatgtcaca

SEQ ID NO: 41373 - DNA, 33 bp, Homo sapiens
tgttgagagcttcctacgtgtcaagtcttgtga

SEQ ID NO: 41374 - DNA, 33 bp, Homo sapiens
tgtaaattactaacaccgtcaactgagagtaga

SEQ ID NO: 41375 - DNA, 33 bp, Homo sapiens
aatgtctattgtgaccccattattcatttctgt

SEQ ID NO: 41376 - DNA, 33 bp, Homo sapiens
ccgaagtcctgctttcaattctaggttcctgcc

SEQ ID NO: 41377 - DNA, 33 bp, Homo sapiens
agcatactgcttagtacgctgagaagaaagcgc

SEQ ID NO: 41378 - DNA, 33 bp, Homo sapiens
ctcttcctagcctccacgtaacattataaatat

SEQ ID NO: 41379 - DNA, 33 bp, Homo sapiens
actccatcttccagtacgctttaactccatctt

SEQ ID NO: 41380 - DNA, 51 bp, Homo sapiens
cacaacaatttctttatctagaaaaatgtaattgcttttgacctaccttga

SEQ ID NO: 41381 - DNA, 33 bp, Homo sapiens
gcaaggtttttcaccaaccaacaaacatgcgaa

SEQ ID NO: 41382 - DNA, 33 bp, Homo sapiens
gtggatgaacaaataccaagaggaaacttcaag

SEQ ID NO: 41383 - DNA, 33 bp, Homo sapiens
ctatacacacagtgtaagtagtaacatgactga

SEQ ID NO: 41384 - DNA, 33 bp, Homo sapiens
cccatataataaacacgggaatcttcataaatg

SEQ ID NO: 41385 - DNA, 33 bp, Homo sapiens
aacatgaactgtaccaccccacttacgttgcat

SEQ ID NO: 41386 - DNA, 51 bp, Homo sapiens
atattcatagtgtatcatatgctaacgaaatgcaaataacatcaattctgg

SEQ ID NO: 41387 - DNA, 33 bp, Homo sapiens
aagccctcaactgtgaaaagggaccctgaaagt

SEQ ID NO: 41388 - DNA, 51 bp, Homo sapiens
ccatttgtatttatactatatttgccctttgatactttctcttctttagtt

SEQ ID NO: 41389 - DNA, 51 bp, Homo sapiens
tgcggggaggtgtgccttatcatcaaactcagtagctttccctgagtactt

SEQ ID NO: 41390 - DNA, 33 bp, Homo sapiens
tgggtcctaacaaaccaatgtgagctcatgaaa

SEQ ID NO: 41391 - DNA, 33 bp, Homo sapiens
agtagaggaagtagtgaagtaaaatgcttttta

SEQ ID NO: 41392 - DNA, 33 bp, Homo sapiens
taccaacaacattgtacctgagctgtttcactc

SEQ ID NO: 41393 - DNA, 33 bp, Homo sapiens
attctggatcagaaggaaaacttacgtgttatt

SEQ ID NO: 41394 - DNA, 33 bp, Homo sapiens
aacctgttaggtcctccagtgcaggatgtactt

SEQ ID NO: 41395 - DNA, 33 bp, Homo sapiens
tatgaattttactttcacgatcacacagctaaa

SEQ ID NO: 41396 - DNA, 33 bp, Homo sapiens
tcagcataatgttttccctctcagatcttgaag

SEQ ID NO: 41397 - DNA, 33 bp, Homo sapiens
ggtgtttgttatgctgcacaatttgtcaaatac

SEQ ID NO: 41398 - DNA, 33 bp, Homo sapiens
tttagagtccacttacacttgacttatatgtga

SEQ ID NO: 41399 - DNA, 33 bp, Homo sapiens
ttttataaatgatgaaaccaattcaggtatatt

SEQ ID NO: 41400 - DNA, 33 bp, Homo sapiens
aagttaaaaacctagaccaattataggctgctg

SEQ ID NO: 41401 - DNA, 33 bp, Homo sapiens
ctcccagttttgctgaataagtgtgaagtgtca

SEQ ID NO: 41402 - DNA, 33 bp, Homo sapiens
aaaacaaacacaaaaacattactcatacttgac

SEQ ID NO: 41403 - DNA, 33 bp, Homo sapiens
tgatgggagaggcatccctgaaggtttctgaca

SEQ ID NO: 41404 - DNA, 33 bp, Homo sapiens
taaaccatcttccaaagtgaatgtaccattttg

SEQ ID NO: 41405 - DNA, 51 bp, Homo sapiens
tgaccaaagatttaaatcacaatacaacattccctttggatacattgaaag

SEQ ID NO: 41406 - DNA, 33 bp, Homo sapiens
ttccttgaatcagacaaatctgtgtcaataccc

SEQ ID NO: 41407 - DNA, 33 bp, Homo sapiens
gatttctctgtctcataaatatataaaacctga

SEQ ID NO: 41408 - DNA, 33 bp, Homo sapiens
gcccacaggaaaaggagaaactgacccaatgga

SEQ ID NO: 41409 - DNA, 33 bp, Homo sapiens
tgagtgcacttaccataaaagtgttagattaag

SEQ ID NO: 41410 - DNA, 33 bp, Homo sapiens
attgtctactttaactgactactgcaaagacta

SEQ ID NO: 41411 - DNA, 33 bp, Homo sapiens
gtggctttatgctgccccctatgtaatttagtt

SEQ ID NO: 41412 - DNA, 33 bp, Homo sapiens
aggaatgctctttgcaatgaaagtcagctggac

SEQ ID NO: 41413 - DNA, 33 bp, Homo sapiens
aacacgggcagaataaaagggtgtaatgtcagt

SEQ ID NO: 41414 - DNA, 33 bp, Homo sapiens
gagataagttgaggtgccacataggaagaatat

SEQ ID NO: 41415 - DNA, 33 bp, Homo sapiens
ttcacaacctgttattcaaaggtccaccgtatt

SEQ ID NO: 41416 - DNA, 33 bp, Homo sapiens
atacatatacacgataaaaatatacacatacat

SEQ ID NO: 41417 - DNA, 33 bp, Homo sapiens
attctgtctttcttgcacagttcaaataagggc

SEQ ID NO: 41418 - DNA, 33 bp, Homo sapiens
ggcaacattgacgaataacagttacatttattt

SEQ ID NO: 41419 - DNA, 33 bp, Homo sapiens
attttataaggaattgaaagtcattgaaaatat

SEQ ID NO: 41420 - DNA, 33 bp, Homo sapiens
taatatgccaagttaaacaaaaccattttaatg

SEQ ID NO: 41421 - DNA, 33 bp, Homo sapiens
gtgcattttcctagagactcaggatgagaagaa

SEQ ID NO: 41422 - DNA, 51 bp, Homo sapiens
ttgcagaaccattagaccaaaagccaaagtaagtgtgtgaactcacaatag

SEQ ID NO: 41423 - DNA, 51 bp, Homo sapiens
caattatcccaaagcttcatggtgtaaacttgcaaacgtttgctacttgtc

SEQ ID NO: 41424 - DNA, 33 bp, Homo sapiens
agatacaactcctgtgaacaactctcatggatc

SEQ ID NO: 41425 - DNA, 33 bp, Homo sapiens
atctctagagatataaccacatttactcaagaa

SEQ ID NO: 41426 - DNA, 33 bp, Homo sapiens
gaggagatgtaaattcacaggcacttccagcta

SEQ ID NO: 41427 - DNA, 33 bp, Homo sapiens
tgttctggagaggaaacgaaggtcatagccgaa

SEQ ID NO: 41428 - DNA, 33 bp, Homo sapiens
ttacttgtaaacctccaaaattgaggcaagtta

SEQ ID NO: 41429 - DNA, 33 bp, Homo sapiens
ggtaccatatttgtcacgtggattgaaatctta

SEQ ID NO: 41430 - DNA, 33 bp, Homo sapiens
ccaaaaccttaatataactctcacggtcggact

SEQ ID NO: 41431 - DNA, 33 bp, Homo sapiens
aaaataaagtaaggagcatcaaggccaaaatct

SEQ ID NO: 41432 - DNA, 33 bp, Homo sapiens
aatcaggattacctcaagagatagaagttaaga

SEQ ID NO: 41433 - DNA, 33 bp, Homo sapiens
ccatttgttaactccagtgaattgtctgtgcaa

SEQ ID NO: 41434 - DNA, 33 bp, Homo sapiens
gtgcagtgcaaggctacactcaggagcagagtg

SEQ ID NO: 41435 - DNA, 33 bp, Homo sapiens
tatgagcctgtaagaaccacagaattactgggc

SEQ ID NO: 41436 - DNA, 33 bp, Homo sapiens
gatgagaaacacttacccttcctgttatggtga

SEQ ID NO: 41437 - DNA, 33 bp, Homo sapiens
gcagtgcagtcataataaaggtcttactcaatt

SEQ ID NO: 41438 - DNA, 51 bp, Homo sapiens
tctttagggtagtaataaagactaaataagtagtgtctgaatctatggcag

SEQ ID NO: 41439 - DNA, 33 bp, Homo sapiens
agacaggaaagaaataactgcccatgaaaagga

SEQ ID NO: 41440 - DNA, 51 bp, Homo sapiens
aaatgagatattttgtatttagtaaaaaggcctcagctacatataagtgta

SEQ ID NO: 41441 - DNA, 51 bp, Homo sapiens
agtcaatattagtttgcaatgataacgatgataattttcatgaacaagtta

SEQ ID NO: 41442 - DNA, 51 bp, Homo sapiens
ggggggataattttacacataactcatagggttttcatgataatttaaaag

SEQ ID NO: 41443 - DNA, 51 bp, Homo sapiens
tatggaagctcttttttttgcacccaccagacacttcttccctgaacaaat

SEQ ID NO: 41444 - DNA, 51 bp, Homo sapiens
atgctcaccattttcatagcagaaaactagttatactaaattgttctaatt

SEQ ID NO: 41445 - DNA, 33 bp, Homo sapiens
aaccaatacatggcacaagaagagacaaaaatt

SEQ ID NO: 41446 - DNA, 33 bp, Homo sapiens
tcactttctctctctgacacatctctgaagcag

SEQ ID NO: 41447 - DNA, 51 bp, Homo sapiens
atagtccagatcctaactaggagtaaaaatgtgaattgtgctgcctgatct

SEQ ID NO: 41448 - DNA, 33 bp, Homo sapiens
tgtgttacttgcaaaacatccttggcttaagaa

SEQ ID NO: 41449 - DNA, 33 bp, Homo sapiens
atgttgttttatgcaacgaattttgaacagaaa

SEQ ID NO: 41450 - DNA, 33 bp, Homo sapiens
agaaatctcaaagtcaaatgaatggcaatattt

SEQ ID NO: 41451 - DNA, 33 bp, Homo sapiens
aacaaatgtttgtgaaaaagcggctttgaaaat

SEQ ID NO: 41452 - DNA, 33 bp, Homo sapiens
gcccactaacatctgggcaattttccaatgcaa

SEQ ID NO: 41453 - DNA, 33 bp, Homo sapiens
ttaaaaccattgctagacacagcttggatgtat

SEQ ID NO: 41454 - DNA, 33 bp, Homo sapiens
aaggcagtaaaacatcacaatttaacttttata

SEQ ID NO: 41455 - DNA, 33 bp, Homo sapiens
atcactagaaattggaagttcattgaaaatgca

SEQ ID NO: 41456 - DNA, 33 bp, Homo sapiens
gaaggagaacttagtccgagtaaaggtcacaag

SEQ ID NO: 41457 - DNA, 33 bp, Homo sapiens
aaaccatttcaatcaaataattcagaataaagc

SEQ ID NO: 41458 - DNA, 33 bp, Homo sapiens
atgataatagtacttcactacattcttgatcct

SEQ ID NO: 41459 - DNA, 33 bp, Homo sapiens
cctggctgtatatgaaagaggatcaaacacaaa

SEQ ID NO: 41460 - DNA, 33 bp, Homo sapiens
taatggagaaaaattccactgagctaaatatat

SEQ ID NO: 41461 - DNA, 33 bp, Homo sapiens
agacctgtcaatgtgtaaaaatattatctagaa

SEQ ID NO: 41462 - DNA, 33 bp, Homo sapiens
ggatctggcattgcacaacaggtgaaaataagg

SEQ ID NO: 41463 - DNA, 33 bp, Homo sapiens
tgtaaatcacctctccactactccttaggctcc

SEQ ID NO: 41464 - DNA, 33 bp, Homo sapiens
gtttacactgtagtcactgaaatcaatctacgc

SEQ ID NO: 41465 - DNA, 51 bp, Homo sapiens
taatgtccctttacaatgtatagcaaggatactgattagagagccatcatt

SEQ ID NO: 41466 - DNA, 51 bp, Homo sapiens
taacagaaaaaagaaaaagaagaacaacagataagatatttgtggtatctg

SEQ ID NO: 41467 - DNA, 51 bp, Homo sapiens
atataatgatcgtatgtaaataagcacagcataacttactgaaaagagaaa

SEQ ID NO: 41468 - DNA, 33 bp, Homo sapiens
ccacagtgtcctggacccatttagatcaattgt

SEQ ID NO: 41469 - DNA, 33 bp, Homo sapiens
agtcatgagagaagaccgaatgctaaaggaacc

SEQ ID NO: 41470 - DNA, 33 bp, Homo sapiens
gactgagaaaggagaacgggggaagtatgaagg

SEQ ID NO: 41471 - DNA, 33 bp, Homo sapiens
ttattacatcaagaacaagataggtgccacaac

SEQ ID NO: 41472 - DNA, 33 bp, Homo sapiens
taaaaaatatgttatcgctagcttcagcgtcct

SEQ ID NO: 41473 - DNA, 51 bp, Homo sapiens
tgaaatcctaatccttcctaggagcgaattattaacttgaatttgatgttt

SEQ ID NO: 41474 - DNA, 33 bp, Homo sapiens
caccatataacaagcagaacctactgagatgga

SEQ ID NO: 41475 - DNA, 33 bp, Homo sapiens
gggatcaggtagaagaagttacagcggacaacc

SEQ ID NO: 41476 - DNA, 51 bp, Homo sapiens
ggatatttgagctcatggtacattacaaaggagtatgtcaacatagagcac

SEQ ID NO: 41477 - DNA, 33 bp, Homo sapiens
gctttccattacttcacgtctgagtccagtttc

SEQ ID NO: 41478 - DNA, 33 bp, Homo sapiens
aacactgtgactatcagacgatgtgaatgactc

SEQ ID NO: 41479 - DNA, 51 bp, Homo sapiens
aattctatgaattctgggccagtctctccacccagaatgtagtattctaaa

SEQ ID NO: 41480 - DNA, 33 bp, Homo sapiens
ttcagcctggcttaggcagatagtaaatatttt

SEQ ID NO: 41481 - DNA, 33 bp, Homo sapiens
gagtgaagaggaaccacaagttctaagcactaa

SEQ ID NO: 41482 - DNA, 33 bp, Homo sapiens
gccaatgtgatttatgaagatttctgaaaaaaa

SEQ ID NO: 41483 - DNA, 33 bp, Homo sapiens
gttagaaagcccagacccttgaaaaactaccaa

SEQ ID NO: 41484 - DNA, 33 bp, Homo sapiens
ttctaaatcaatgacacctgttcacatgttaag

SEQ ID NO: 41485 - DNA, 33 bp, Homo sapiens
taaactgttttttccacgaatgagagaaaggaa

SEQ ID NO: 41486 - DNA, 33 bp, Homo sapiens
atgagataccactttacgaccactgcgatgact

SEQ ID NO: 41487 - DNA, 33 bp, Homo sapiens
tctactagccagtaaacgtctgaatgtgtggct

SEQ ID NO: 41488 - DNA, 33 bp, Homo sapiens
gctatcattcacttcacggaggacaacaaatgc

SEQ ID NO: 41489 - DNA, 33 bp, Homo sapiens
aaatttatccttctacactcatcttactgtgac

SEQ ID NO: 41490 - DNA, 33 bp, Homo sapiens
cttcttatcagtgtgaagatctttgataacagt

SEQ ID NO: 41491 - DNA, 33 bp, Homo sapiens
ctttatctgacctaaagaaacttcatcatcctt

SEQ ID NO: 41492 - DNA, 33 bp, Homo sapiens
ggacagggccctaaaccatgcatcgtggctgtt

SEQ ID NO: 41493 - DNA, 33 bp, Homo sapiens
agataattttgccacactgtatcttgtcttttt

SEQ ID NO: 41494 - DNA, 33 bp, Homo sapiens
acacagggaagtataaaatatccacgcaaaatc

SEQ ID NO: 41495 - DNA, 33 bp, Homo sapiens
ctttactttagacagacattaacatcagaaggc

SEQ ID NO: 41496 - DNA, 51 bp, Homo sapiens
gaaagacaaggctcaggttgccaagcgccacccttccattgaaaaatggag

SEQ ID NO: 41497 - DNA, 33 bp, Homo sapiens
ttgaagtgtgagataaatataaagacagggcca

SEQ ID NO: 41498 - DNA, 51 bp, Homo sapiens
gatttctctatccaaatagccagcaaatactactcacctgattgacagact

SEQ ID NO: 41499 - DNA, 51 bp, Homo sapiens
gaccagagtgcggaaacctcattcacatatcattaacacacctggcatacg

SEQ ID NO: 41500 - DNA, 33 bp, Homo sapiens
gttctgtgaagttttccatgttctactttcttg

SEQ ID NO: 41501 - DNA, 33 bp, Homo sapiens
ccccaatggctatataaatgagaaaaccaatat

SEQ ID NO: 41502 - DNA, 33 bp, Homo sapiens
acttattgctttactgaacatcataaagattgc

SEQ ID NO: 41503 - DNA, 33 bp, Homo sapiens
ttgtgacagtaaatgacggaacactttatcaat

SEQ ID NO: 41504 - DNA, 33 bp, Homo sapiens
tctaggaagtattgaacctgtctaagaaaccct

SEQ ID NO: 41505 - DNA, 33 bp, Homo sapiens
aaatgaaacaacaatccccacgaagcagtctta

SEQ ID NO: 41506 - DNA, 33 bp, Homo sapiens
ttgatgaatttctcacaagatactcatgcaata

SEQ ID NO: 41507 - DNA, 33 bp, Homo sapiens
ctgatattagtccatacgcaatttcttacaaaa

SEQ ID NO: 41508 - DNA, 33 bp, Homo sapiens
agctctcaggatttgccagtaagtagtttgtag

SEQ ID NO: 41509 - DNA, 33 bp, Homo sapiens
agtgcctgtcattagacggggtggtttaaacaa

SEQ ID NO: 41510 - DNA, 33 bp, Homo sapiens
ggcagagaattacctcaaattaagttcaaattt

SEQ ID NO: 41511 - DNA, 51 bp, Homo sapiens
cttgagacagcaatgaagggatgaaagaatgaatgagtttatatttcaatt

SEQ ID NO: 41512 - DNA, 33 bp, Homo sapiens
agagatttccgtcatcaagtaaatttagagaag

SEQ ID NO: 41513 - DNA, 33 bp, Homo sapiens
aatgtgtctaggaaaccctctagtgcttagtcc

SEQ ID NO: 41514 - DNA, 33 bp, Homo sapiens
gcacagtcctaggccacgctcaaattttattat

SEQ ID NO: 41515 - DNA, 33 bp, Homo sapiens
gattcttcctgatataactgagaagaaaccagc

SEQ ID NO: 41516 - DNA, 33 bp, Homo sapiens
tgaattggtaattggcagatcaagtaaaatgtt

SEQ ID NO: 41517 - DNA, 51 bp, Homo sapiens
cctggcaatcagtaattacctatgtcttttctgcattttctttaccaataa

SEQ ID NO: 41518 - DNA, 33 bp, Homo sapiens
agagtgtgctcaagtgaaatcgacaaccagtaa

SEQ ID NO: 41519 - DNA, 51 bp, Homo sapiens
aacaatcctcttccagatatttgacatggcttcctccttcaccttctttgg

SEQ ID NO: 41520 - DNA, 33 bp, Homo sapiens
tttgcaatgtagtgacaaggtccttctttcacc

SEQ ID NO: 41521 - DNA, 33 bp, Homo sapiens
attttccagttttgataaaatgaaaccacaggg

SEQ ID NO: 41522 - DNA, 51 bp, Homo sapiens
attttggatcttccagtaatgtccaagtaatcaacatgagaccaggtgaaa

SEQ ID NO: 41523 - DNA, 51 bp, Homo sapiens
accatctctggctggccctggaatgacattacagttttctgacacaatgca

SEQ ID NO: 41524 - DNA, 33 bp, Homo sapiens
aattaggacaagagaactgaagtcatagaaggg

SEQ ID NO: 41525 - DNA, 33 bp, Homo sapiens
agaaaaatgtcacagaacacatacatattatat

SEQ ID NO: 41526 - DNA, 33 bp, Homo sapiens
agtgatggaatgggacggaaacccaagtctgcc

SEQ ID NO: 41527 - DNA, 33 bp, Homo sapiens
tacctggcacaggacaggtactcagtaagtgag

SEQ ID NO: 41528 - DNA, 33 bp, Homo sapiens
cagccaatcagggtacaggaacacccaaatatg

SEQ ID NO: 41529 - DNA, 51 bp, Homo sapiens
tggtagttctgtatcccaagccaaactcaaaatccgaaattatctgttaca

SEQ ID NO: 41530 - DNA, 33 bp, Homo sapiens
aagtaggttctcaccaaatttatcccaagaaca

SEQ ID NO: 41531 - DNA, 51 bp, Homo sapiens
cacagagcagtcacagaccaaatgacggataattaagcattcttggtacca

SEQ ID NO: 41532 - DNA, 33 bp, Homo sapiens
caggctggggtttagagcttattggagaaggta

SEQ ID NO: 41533 - DNA, 33 bp, Homo sapiens
acactacgtacagaaacgaaccaccaccacctt

SEQ ID NO: 41534 - DNA, 33 bp, Homo sapiens
gtaatctgtaggtaaaacatacttgtcacactg

SEQ ID NO: 41535 - DNA, 33 bp, Homo sapiens
ttttttaaaaaccgtcaaagctatacagtagtt

SEQ ID NO: 41536 - DNA, 33 bp, Homo sapiens
agaccagataagaagagagatttgagtaggagg

SEQ ID NO: 41537 - DNA, 33 bp, Homo sapiens
tggattagtgcaagctaaagtgtcatcatatat

SEQ ID NO: 41538 - DNA, 33 bp, Homo sapiens
aggtaacaagatcagcaaatgctaacagcagct

SEQ ID NO: 41539 - DNA, 33 bp, Homo sapiens
attgaggtcttatagacatgaaatagctgcaga

SEQ ID NO: 41540 - DNA, 33 bp, Homo sapiens
tacagtacctaaaatactaagcactcaaaaaag

SEQ ID NO: 41541 - DNA, 33 bp, Homo sapiens
tctgtgagatgtccaacgaacgtgtcaggctaa

SEQ ID NO: 41542 - DNA, 33 bp, Homo sapiens
ttgccattccacaaataactatgaaagtgcatg

SEQ ID NO: 41543 - DNA, 33 bp, Homo sapiens
aattattccaatatcacgtatcaccctgcatgc

SEQ ID NO: 41544 - DNA, 33 bp, Homo sapiens
aagtttaagaaaatgacaaatcagccttagaaa

SEQ ID NO: 41545 - DNA, 33 bp, Homo sapiens
ctttcctatctctacacctgctctttcctcagc

SEQ ID NO: 41546 - DNA, 33 bp, Homo sapiens
cagacctccctaatgcaatttattgtaccaata

SEQ ID NO: 41547 - DNA, 33 bp, Homo sapiens
aaaggcataacaaggaatcctcatacttcaaac

SEQ ID NO: 41548 - DNA, 33 bp, Homo sapiens
gctggtattgtgctgacctacgaggtttccaaa

SEQ ID NO: 41549 - DNA, 33 bp, Homo sapiens
acatgaatagtatgaactgaaaacaatccttgt

SEQ ID NO: 41550 - DNA, 51 bp, Homo sapiens
ctgctcacccactcatgagaacacacctaaaagaatgtatttaacagtgtt

SEQ ID NO: 41551 - DNA, 33 bp, Homo sapiens
gtagaaagttaatgagccaagagcccttataat

SEQ ID NO: 41552 - DNA, 33 bp, Homo sapiens
gccctctgtattctgacggtgaagtttgtggtt

SEQ ID NO: 41553 - DNA, 33 bp, Homo sapiens
gagcagaactattaaacaacaaggtctatatgg

SEQ ID NO: 41554 - DNA, 33 bp, Homo sapiens
ggaaagtaggtcacgacataaagggtcaaataa

SEQ ID NO: 41555 - DNA, 33 bp, Homo sapiens
gggagattggtcaagcaaagtggttcacacctg

SEQ ID NO: 41556 - DNA, 33 bp, Homo sapiens
tgagtctatcctgagccatctgtaactagcaat

SEQ ID NO: 41557 - DNA, 33 bp, Homo sapiens
tgaccaaatgagaaggaatgggcttaacacatg

SEQ ID NO: 41558 - DNA, 33 bp, Homo sapiens
cttacagctcccattcccctaatttaagaaaat

SEQ ID NO: 41559 - DNA, 33 bp, Homo sapiens
ttctggcagattttgcggacaaggctcaattta

SEQ ID NO: 41560 - DNA, 33 bp, Homo sapiens
cagttgatttaaataaagttggagaggccacac

SEQ ID NO: 41561 - DNA, 33 bp, Homo sapiens
tttcatgttcttgataatacagtgaccttttag

SEQ ID NO: 41562 - DNA, 33 bp, Homo sapiens
cccaggacacaaaaaccgagtttgctttcttca

SEQ ID NO: 41563 - DNA, 33 bp, Homo sapiens
agcaagtgcaaagccaatgagaactgagtgtaa

SEQ ID NO: 41564 - DNA, 33 bp, Homo sapiens
cctctgtgttccaaagacctttcaatataattc

SEQ ID NO: 41565 - DNA, 33 bp, Homo sapiens
cttcctcttactttccagaatgccctactctgt

SEQ ID NO: 41566 - DNA, 33 bp, Homo sapiens
cagagtcaggagattgaataataacactcttct

SEQ ID NO: 41567 - DNA, 33 bp, Homo sapiens
gggcgctgtgtcttaaatcccaccggcttctcc

SEQ ID NO: 41568 - DNA, 33 bp, Homo sapiens
atattagtggtaaaagaaaacatagactcaatc

SEQ ID NO: 41569 - DNA, 33 bp, Homo sapiens
gcaagttatagatacgcacatgttgacaagaac

SEQ ID NO: 41570 - DNA, 33 bp, Homo sapiens
gcagccccttgggtgacggtctacaaagaacgc

SEQ ID NO: 41571 - DNA, 33 bp, Homo sapiens
agtgtaatcacagggtccctataagagaagact

SEQ ID NO: 41572 - DNA, 33 bp, Homo sapiens
atcttacctaagagagaagcatataatccattc

SEQ ID NO: 41573 - DNA, 51 bp, Homo sapiens
ttttcccttcaactattttagcacagggagttcacaactcattccagctac

SEQ ID NO: 41574 - DNA, 33 bp, Homo sapiens
aaggggctattttctccagtggccacaggattg

SEQ ID NO: 41575 - DNA, 33 bp, Homo sapiens
ttcaaaaacagtctgcaactttacacaaacgtt

SEQ ID NO: 41576 - DNA, 33 bp, Homo sapiens
ataattttatgggaccgccatcatttatgcagt

SEQ ID NO: 41577 - DNA, 33 bp, Homo sapiens
tccaggggagtactgtaaataacagagatgtta

SEQ ID NO: 41578 - DNA, 51 bp, Homo sapiens
gaattaatatattatcaatcataaccgtatctatatatatttaaaaaaaga

SEQ ID NO: 41579 - DNA, 33 bp, Homo sapiens
cactttttgatgcaaacttctctttaaaagaca

SEQ ID NO: 41580 - DNA, 33 bp, Homo sapiens
gagtaatgctaatccaagactgctggtttttca

SEQ ID NO: 41581 - DNA, 33 bp, Homo sapiens
tctggagatgaagtctaaaactgctcagttaaa

SEQ ID NO: 41582 - DNA, 33 bp, Homo sapiens
acttatggtggttactcaactttgcatcagttc

SEQ ID NO: 41583 - DNA, 33 bp, Homo sapiens
gttcctactttaccgaaagcccaggggcctctt

SEQ ID NO: 41584 - DNA, 33 bp, Homo sapiens
attaaaaggtcataaactattgtgaagaacagc

SEQ ID NO: 41585 - DNA, 33 bp, Homo sapiens
gattttcagattcagagggaattgcaaggggat

SEQ ID NO: 41586 - DNA, 33 bp, Homo sapiens
ttgaggaaagagaatcaccataactggcatatt

SEQ ID NO: 41587 - DNA, 51 bp, Homo sapiens
atcaatgttctctgtttgtaatacacatatggtgagattatttctacagag

SEQ ID NO: 41588 - DNA, 51 bp, Homo sapiens
taatattaggtaatgtaaatgatgacaaatgagagatagcttatacccagt

SEQ ID NO: 41589 - DNA, 51 bp, Homo sapiens
atcatgttaatggtaaaatttttaacgtcaagagcagtataaaacaggtca

SEQ ID NO: 41590 - DNA, 51 bp, Homo sapiens
aggctacctaataaaaggatgaaacagatgcaaattccgagaagtgtgcag

SEQ ID NO: 41591 - DNA, 33 bp, Homo sapiens
ggggttcccaaagaacagcatcaacatcacctg

SEQ ID NO: 41592 - DNA, 51 bp, Homo sapiens
gaagagcccttgggccttaagggaacattgtttgtaggctggcagtactcc

SEQ ID NO: 41593 - DNA, 33 bp, Homo sapiens
atgattcgagacccaacagaaatgtcacatagg

SEQ ID NO: 41594 - DNA, 51 bp, Homo sapiens
ggattaccccaaatgaacaaatacaatcttttaaaagtgatcactttgcac

SEQ ID NO: 41595 - DNA, 33 bp, Homo sapiens
atgcaggagattacaacaatagctacagtacct

SEQ ID NO: 41596 - DNA, 33 bp, Homo sapiens
aacttctagaccataacactgtgagatagtaaa

SEQ ID NO: 41597 - DNA, 33 bp, Homo sapiens
attcacatttctacataaaggccagcaatgaat

SEQ ID NO: 41598 - DNA, 33 bp, Homo sapiens
aaattaacttacattcaaatctgaaagtcaatg

SEQ ID NO: 41599 - DNA, 33 bp, Homo sapiens
catacagttgttgagacaatcttacacacttag

SEQ ID NO: 41600 - DNA, 33 bp, Homo sapiens
attgagattccagaaacatagctaacccaaatt

SEQ ID NO: 41601 - DNA, 33 bp, Homo sapiens
tgctgaaagcaatttacggactcaaagctattt

SEQ ID NO: 41602 - DNA, 33 bp, Homo sapiens
ataccccacttgtggcaccgattttctgtatta

SEQ ID NO: 41603 - DNA, 33 bp, Homo sapiens
tgataggtaaacaagagcattggtgtgttagga

SEQ ID NO: 41604 - DNA, 33 bp, Homo sapiens
actccaagactatgtacgcaaatattcctacaa

SEQ ID NO: 41605 - DNA, 33 bp, Homo sapiens
tttcttgagaggacaaatgctgtatccttacac

SEQ ID NO: 41606 - DNA, 33 bp, Homo sapiens
tgagcacttgtagctacctttgaaaatagcatg

SEQ ID NO: 41607 - DNA, 33 bp, Homo sapiens
aggagtagcaaaatccaattgaaaaaattctat

SEQ ID NO: 41608 - DNA, 33 bp, Homo sapiens
cagcatgcctttgtcaggtatctggccatgtgc

SEQ ID NO: 41609 - DNA, 33 bp, Homo sapiens
catgtttaccaatgagaaattcatcataatttt

SEQ ID NO: 41610 - DNA, 51 bp, Homo sapiens
atctttagtggccaagggcacttctcacccatttaaacactccagctaaga

SEQ ID NO: 41611 - DNA, 51 bp, Homo sapiens
ttttcagcatacttacacccgataccaatttccttaacttggacctccgtc

SEQ ID NO: 41612 - DNA, 33 bp, Homo sapiens
ggttaccaactatatcaatcactggtttgcaac

SEQ ID NO: 41613 - DNA, 33 bp, Homo sapiens
actaacattgaatactaacactgaatgtaaatg

SEQ ID NO: 41614 - DNA, 33 bp, Homo sapiens
ttaatgacaaaaatcacaattacatttgtatca

SEQ ID NO: 41615 - DNA, 33 bp, Homo sapiens
taagcaactagtctgacagaaacattttattgg

SEQ ID NO: 41616 - DNA, 33 bp, Homo sapiens
tatccttttctctaacacttgcaaaatctttca

SEQ ID NO: 41617 - DNA, 33 bp, Homo sapiens
agcatatttgacaccaacgtagatcactcctta

SEQ ID NO: 41618 - DNA, 33 bp, Homo sapiens
tccagctgcgtgtgaaaatgtgtaccgtgtggt

SEQ ID NO: 41619 - DNA, 51 bp, Homo sapiens
ctaactttaagtgtgtgatccccaaatatcattgttgtcttttcaaaagtt

SEQ ID NO: 41620 - DNA, 33 bp, Homo sapiens
ggtgctaaaatggttcccttgtcagaggagtta

SEQ ID NO: 41621 - DNA, 51 bp, Homo sapiens
ctgtaatcccttaagaagcatgttcaagaaataatttaggttcccacatag

SEQ ID NO: 41622 - DNA, 33 bp, Homo sapiens
gtgcctcagcgccaaacaggatccaggcctccg

SEQ ID NO: 41623 - DNA, 33 bp, Homo sapiens
tggaaaaaaacataagaatgcatacatgggtgc

SEQ ID NO: 41624 - DNA, 33 bp, Homo sapiens
cactgaggcttggcaccatttgagagatgccaa

SEQ ID NO: 41625 - DNA, 33 bp, Homo sapiens
gtatcaaacgataatgaagtaagaactgatccc

SEQ ID NO: 41626 - DNA, 33 bp, Homo sapiens
aaatcacttagccataacatcttccaattgaga

SEQ ID NO: 41627 - DNA, 33 bp, Homo sapiens
acgtgggagcagtgaaaggaaccaattttcaaa

SEQ ID NO: 41628 - DNA, 33 bp, Homo sapiens
atctaatgctgaggccaacaaggaagacaacaa

SEQ ID NO: 41629 - DNA, 33 bp, Homo sapiens
caatatatagtttgtaaatttcaacgctttccc

SEQ ID NO: 41630 - DNA, 33 bp, Homo sapiens
accttccccgtgtggacacgagagaacacgagc

SEQ ID NO: 41631 - DNA, 33 bp, Homo sapiens
ctgcattccttttacactatagaaggtgcttac

SEQ ID NO: 41632 - DNA, 33 bp, Homo sapiens
taataaatcctattccacacggttgttatgaac

SEQ ID NO: 41633 - DNA, 33 bp, Homo sapiens
aagtcagcctcagatacgacccaagggatacgt

SEQ ID NO: 41634 - DNA, 33 bp, Homo sapiens
agagagctcagactcactcttgttttagtgact

SEQ ID NO: 41635 - DNA, 33 bp, Homo sapiens
atttgaccttgagaaaataaatcttcatgccat

SEQ ID NO: 41636 - DNA, 33 bp, Homo sapiens
acaaatgatattaacacagagagcgagggtgaa

SEQ ID NO: 41637 - DNA, 33 bp, Homo sapiens
taagacaatcagtcaaacaaatgctattgagta

SEQ ID NO: 41638 - DNA, 51 bp, Homo sapiens
ctcagaagccattttttaattttggcatcgttcggcatgtggagagttgag

SEQ ID NO: 41639 - DNA, 33 bp, Homo sapiens
ttagtacagacgcaacaaatcatcttttttttt

SEQ ID NO: 41640 - DNA, 33 bp, Homo sapiens
cttccggaaatgccaccgggacttgttttatcc

SEQ ID NO: 41641 - DNA, 33 bp, Homo sapiens
gaggactaagagggacaccaggataaaacaagt

SEQ ID NO: 41642 - DNA, 33 bp, Homo sapiens
tgctgtggccgggaaccgtgactctttgccaac

SEQ ID NO: 41643 - DNA, 33 bp, Homo sapiens
tggctggagaaacaaagacaaggtagagaggaa

SEQ ID NO: 41644 - DNA, 33 bp, Homo sapiens
cagtgtgagaatgaggccattatttttgtgtta

SEQ ID NO: 41645 - DNA, 33 bp, Homo sapiens
aagtgcaacatgagaacgtgaaaaaatgcatta

SEQ ID NO: 41646 - DNA, 33 bp, Homo sapiens
tcagcctggaaacagaacgacatattgatacat

SEQ ID NO: 41647 - DNA, 33 bp, Homo sapiens
gaaaaaaatggtaaaacttggagagactctcag

SEQ ID NO: 41648 - DNA, 33 bp, Homo sapiens
aagactatggtagagcacatttcctgaactcaa

SEQ ID NO: 41649 - DNA, 33 bp, Homo sapiens
ggtatgtggtaatggcagaaaaaataaacacaa

SEQ ID NO: 41650 - DNA, 33 bp, Homo sapiens
taccaagtcactattacagagccaatccagatg

SEQ ID NO: 41651 - DNA, 33 bp, Homo sapiens
aaagggaagagaaaaaggtaagtcaggtcatta

SEQ ID NO: 41652 - DNA, 33 bp, Homo sapiens
agttattcaaattcctcaatctggattagtaca

SEQ ID NO: 41653 - DNA, 33 bp, Homo sapiens
ctggaaactgcagaagaattgtgatctatttga

SEQ ID NO: 41654 - DNA, 33 bp, Homo sapiens
aaccactaagtatgaaatagatgtcttgttctc

SEQ ID NO: 41655 - DNA, 33 bp, Homo sapiens
cattcttgtcttggtcacagaaggaacggcaca

SEQ ID NO: 41656 - DNA, 33 bp, Homo sapiens
tcctttcacagtaatacagattcgtttcaatga

SEQ ID NO: 41657 - DNA, 51 bp, Homo sapiens
gcatgacttactttatttggaacaacgagacactgcttaactcccgatttg

SEQ ID NO: 41658 - DNA, 33 bp, Homo sapiens
actatgcccatgtacaagaactatgtagatgaa

SEQ ID NO: 41659 - DNA, 33 bp, Homo sapiens
tcctctatatcaaacactggacttccaggaaat

SEQ ID NO: 41660 - DNA, 33 bp, Homo sapiens
ttttgtctgacagatacctctagagtgccacat

SEQ ID NO: 41661 - DNA, 51 bp, Homo sapiens
aaagccaaacctcttatttctcataacttgctgtggtcagcagataggcat

SEQ ID NO: 41662 - DNA, 33 bp, Homo sapiens
tattgaaatgtgtcacggcctgtgagaacaaca

SEQ ID NO: 41663 - DNA, 33 bp, Homo sapiens
ctccctgtcccctttcaatattggtcactggac

SEQ ID NO: 41664 - DNA, 33 bp, Homo sapiens
ttagttatcagacttacgtttcagagtgtggga

SEQ ID NO: 41665 - DNA, 33 bp, Homo sapiens
aagcattagtgattctgactgatagacatcatg

SEQ ID NO: 41666 - DNA, 33 bp, Homo sapiens
gctgcaacatgcatgaacattcaaaacatgcca

SEQ ID NO: 41667 - DNA, 33 bp, Homo sapiens
cttcactcctgcctgaaattttaaatattcccc

SEQ ID NO: 41668 - DNA, 33 bp, Homo sapiens
ctcaaaatagcctatgaatgttccctgattaac

SEQ ID NO: 41669 - DNA, 51 bp, Homo sapiens
gtgttttcactctcttgcattttctccaatgaaaagctaagtacaggagtg

SEQ ID NO: 41670 - DNA, 33 bp, Homo sapiens
tcacctatgtggaaaaacatataacgaaataat

SEQ ID NO: 41671 - DNA, 33 bp, Homo sapiens
cgaagtgctggaatgacgaatgataataatttg

SEQ ID NO: 41672 - DNA, 33 bp, Homo sapiens
gttttcatttaaaacccatttggacaatgtaaa

SEQ ID NO: 41673 - DNA, 33 bp, Homo sapiens
gaaatagcaaagggaaactttcaggctgaaatg

SEQ ID NO: 41674 - DNA, 33 bp, Homo sapiens
gtacaaacacaggtaaacaatccttgctgttag

SEQ ID NO: 41675 - DNA, 33 bp, Homo sapiens
tcaaagatcttgccaaaaatctctctctttgaa

SEQ ID NO: 41676 - DNA, 33 bp, Homo sapiens
tctggatctctaggaaatctcacattggcttaa

SEQ ID NO: 41677 - DNA, 33 bp, Homo sapiens
cttgtttccaaaataaagaataatgtccaaaac

SEQ ID NO: 41678 - DNA, 33 bp, Homo sapiens
tgggcatgaataaaaccggctgtgagatacgac

SEQ ID NO: 41679 - DNA, 33 bp, Homo sapiens
ccatgctatggacataataggcacttaatgatc

SEQ ID NO: 41680 - DNA, 33 bp, Homo sapiens
ttctaagttctcaaaaatcctctgcatacacct

SEQ ID NO: 41681 - DNA, 33 bp, Homo sapiens
tcctaacatcagtggaatattcaatccgataag

SEQ ID NO: 41682 - DNA, 33 bp, Homo sapiens
taagtcagaggcttccactgatttcactgggag

SEQ ID NO: 41683 - DNA, 33 bp, Homo sapiens
agaaagaatatttaacaacaactgcagcccagg

SEQ ID NO: 41684 - DNA, 33 bp, Homo sapiens
gatccaagatttgtccaattatgaagttcccaa

SEQ ID NO: 41685 - DNA, 33 bp, Homo sapiens
gaagtatattattcaacattgatttttccttcc

SEQ ID NO: 41686 - DNA, 33 bp, Homo sapiens
ttaacatttcttcacagtagtccagcatattct

SEQ ID NO: 41687 - DNA, 33 bp, Homo sapiens
tggcagctctcttcagaatatgcggcgctgtgg

SEQ ID NO: 41688 - DNA, 33 bp, Homo sapiens
agagtgaaaaagtgcacggaaagagccagcata

SEQ ID NO: 41689 - DNA, 33 bp, Homo sapiens
atatcaggggagatcaggaataggagggatttg

SEQ ID NO: 41690 - DNA, 33 bp, Homo sapiens
gagggatcaaaaactacgtaacaggtagagcgt

SEQ ID NO: 41691 - DNA, 33 bp, Homo sapiens
tctctcaatgacatacactggtatttgaacagt

SEQ ID NO: 41692 - DNA, 33 bp, Homo sapiens
gtctcaagagttgcgacggttttataaatggga

SEQ ID NO: 41693 - DNA, 33 bp, Homo sapiens
gtaaaatcatctccaaatcaacattaatgcgtt

SEQ ID NO: 41694 - DNA, 33 bp, Homo sapiens
gatgtaaaaacaacagaattcaaatgaaatcat

SEQ ID NO: 41695 - DNA, 33 bp, Homo sapiens
tcatgaactctgaaaaataaaggctaagatgac

SEQ ID NO: 41696 - DNA, 33 bp, Homo sapiens
cagaggagcaagaagaaattggctgtagagagt

SEQ ID NO: 41697 - DNA, 33 bp, Homo sapiens
gtgcaggtcacagttgcaccacccagcacaaat

SEQ ID NO: 41698 - DNA, 33 bp, Homo sapiens
tcccttttacctttcacagtcctgagacattcc

SEQ ID NO: 41699 - DNA, 33 bp, Homo sapiens
ctgaccactgtccacacatatcaggatcagagt

SEQ ID NO: 41700 - DNA, 33 bp, Homo sapiens
ctataaacattcataccgaggcttttgtacttg

SEQ ID NO: 41701 - DNA, 33 bp, Homo sapiens
ggaatatcttataggcaagagggagaaccagaa

SEQ ID NO: 41702 - DNA, 33 bp, Homo sapiens
tgtgtagaaactaagacagaaaagtttatctac

SEQ ID NO: 41703 - DNA, 33 bp, Homo sapiens
gaagctgcctacaggagaaggtattttcttgtt

SEQ ID NO: 41704 - DNA, 33 bp, Homo sapiens
actggctagagaactcagaaagaggaaatcctg

SEQ ID NO: 41705 - DNA, 33 bp, Homo sapiens
tatggggccagaaaaaactgaagtcaagagatg

SEQ ID NO: 41706 - DNA, 33 bp, Homo sapiens
ctccagcaacgtctaaccaaatccagtctttga

SEQ ID NO: 41707 - DNA, 33 bp, Homo sapiens
atgaagatctggaataagtgagttgaacctggc

SEQ ID NO: 41708 - DNA, 33 bp, Homo sapiens
ggacagtcatacccccaccacagtgagcgagtg

SEQ ID NO: 41709 - DNA, 51 bp, Homo sapiens
actaataggtgacttacgctataaacgtgcaagagatgttccagataacat

SEQ ID NO: 41710 - DNA, 33 bp, Homo sapiens
ggtccctaagccgccacggccatttcaaagctg

SEQ ID NO: 41711 - DNA, 33 bp, Homo sapiens
gaaccaaccagaagaacgaaactacgaacacgt

SEQ ID NO: 41712 - DNA, 51 bp, Homo sapiens
aagaaggggtggaggtatctgtaaaactattctttctccctttgtaatgaa

SEQ ID NO: 41713 - DNA, 33 bp, Homo sapiens
tgtgtctactaaaccacgctgcagcctctctat

SEQ ID NO: 41714 - DNA, 33 bp, Homo sapiens
ttaaaaaaagattgagacctgtactgagaggat

SEQ ID NO: 41715 - DNA, 33 bp, Homo sapiens
gtgccaacatttttatcaccatagggaagaggc

SEQ ID NO: 41716 - DNA, 33 bp, Homo sapiens
taatcaaatcattatccaacgtgtagaatctaa

SEQ ID NO: 41717 - DNA, 33 bp, Homo sapiens
ttgaaacaaattgcaaaagtcatcatgtgtgac

SEQ ID NO: 41718 - DNA, 33 bp, Homo sapiens
tggctgcaagtttggacggaaacagactcctgg

SEQ ID NO: 41719 - DNA, 33 bp, Homo sapiens
atctttttctgagcagcagaccttaataggagg

SEQ ID NO: 41720 - DNA, 33 bp, Homo sapiens
attcaacctgcctaaactggaagctgtatgatt

SEQ ID NO: 41721 - DNA, 33 bp, Homo sapiens
caacggattgaaacttcaaccaggctttgaaaa

SEQ ID NO: 41722 - DNA, 33 bp, Homo sapiens
ccttttcaggcctataaaaccttctcaaagcct

SEQ ID NO: 41723 - DNA, 33 bp, Homo sapiens
cctctttccggattcaccttgctctaaaatatt

SEQ ID NO: 41724 - DNA, 33 bp, Homo sapiens
ggtctctgttagcaccactttattgcatcccac

SEQ ID NO: 41725 - DNA, 33 bp, Homo sapiens
aaggcctgagttaacacggagtaggagctcaga

SEQ ID NO: 41726 - DNA, 33 bp, Homo sapiens
gtgctaatttgaaaaaactcagtgcaccgtggg

SEQ ID NO: 41727 - DNA, 33 bp, Homo sapiens
tgtttgaagctatacacggacggcagaacaaga

SEQ ID NO: 41728 - DNA, 33 bp, Homo sapiens
gagaggctcaaggggcaagacgctgcgtttcag

SEQ ID NO: 41729 - DNA, 33 bp, Homo sapiens
agaatgtcgtaaattacctctaagtagttaatt

SEQ ID NO: 41730 - DNA, 33 bp, Homo sapiens
aggaatgtttactgaactctgcacgtgttaaca

SEQ ID NO: 41731 - DNA, 33 bp, Homo sapiens
aggaaaccagatgaaaagatattccataaagca

SEQ ID NO: 41732 - DNA, 33 bp, Homo sapiens
cccttcgttcaaactcccacctgttttaggcac

SEQ ID NO: 41733 - DNA, 33 bp, Homo sapiens
ccacgcccgagaaaaaacaatttaatgcttctg

SEQ ID NO: 41734 - DNA, 33 bp, Homo sapiens
gtagtttgccgaccccaatctagattctagagg

SEQ ID NO: 41735 - DNA, 33 bp, Homo sapiens
tttagatagtagctccacattcaggtctcacat

SEQ ID NO: 41736 - DNA, 33 bp, Homo sapiens
gtttatccatgcttgacgagattcttgaagatg

SEQ ID NO: 41737 - DNA, 33 bp, Homo sapiens
atttttggagaatgaacgctaaacagaagaatg

SEQ ID NO: 41738 - DNA, 33 bp, Homo sapiens
ctgtgaaactccttgccgacatctgattgagtg

SEQ ID NO: 41739 - DNA, 33 bp, Homo sapiens
caccctgagctcaagacgaccattttccccact

SEQ ID NO: 41740 - DNA, 33 bp, Homo sapiens
aggagctgagttcacaaggacaccatttccttg

SEQ ID NO: 41741 - DNA, 33 bp, Homo sapiens
actgtttagtggaagccgacttgctcagagcct

SEQ ID NO: 41742 - DNA, 33 bp, Homo sapiens
atgaagtagaagggaacgtctgaacacttggca

SEQ ID NO: 41743 - DNA, 33 bp, Homo sapiens
tgagagtcggcatgacagccatgaagagcccga

SEQ ID NO: 41744 - DNA, 33 bp, Homo sapiens
tttttaagtagaaaaacgcgagaatgtggagtg

SEQ ID NO: 41745 - DNA, 33 bp, Homo sapiens
cagcctctttccttaacgccttcagtggagagg

SEQ ID NO: 41746 - DNA, 33 bp, Homo sapiens
ccgaaaagactctagcacggccatgtagtggaa

SEQ ID NO: 41747 - DNA, 33 bp, Homo sapiens
tattgcaaagttctgaaaaatgattttgaaaaa

SEQ ID NO: 41748 - DNA, 33 bp, Homo sapiens
cctctaagataacaaaatagtgcccaattatat

SEQ ID NO: 41749 - DNA, 33 bp, Homo sapiens
acccctcttatgaaaggaattaaccgagactca

SEQ ID NO: 41750 - DNA, 33 bp, Homo sapiens
aagtggttcatcagtaccttacacttattttta

SEQ ID NO: 41751 - DNA, 51 bp, Homo sapiens
ctcaagaagtttaaaaagcataggactcaaggggagacgcttacaaaaagt

SEQ ID NO: 41752 - DNA, 33 bp, Homo sapiens
cagagaaaagctgggacgcacggaaaacattaa

SEQ ID NO: 41753 - DNA, 33 bp, Homo sapiens
tttgtattaaaattaccgacaaagatgtgatgt

SEQ ID NO: 41754 - DNA, 33 bp, Homo sapiens
ctggctgtatgaaatcaatggaataacgtgctt

SEQ ID NO: 41755 - DNA, 51 bp, Homo sapiens
aaaagatagaacagaattccgaggccctgaacattcaggagggtaaaacgg

SEQ ID NO: 41756 - DNA, 33 bp, Homo sapiens
cttagtacttggattacagcttcagcagatcaa

SEQ ID NO: 41757 - DNA, 51 bp, Homo sapiens
aaaaaaaaaaagtaatctcattgtaaaggaaagcagctgttcacaagagca

SEQ ID NO: 41758 - DNA, 33 bp, Homo sapiens
tttaatgagaaaacgacaggctttgtctttcaa

SEQ ID NO: 41759 - DNA, 51 bp, Homo sapiens
cagaatttccaaacagagggaaaaactaggtggacttgaaatagtaactca

SEQ ID NO: 41760 - DNA, 33 bp, Homo sapiens
ttacagaatggccccaatcattaatgcctccta

SEQ ID NO: 41761 - DNA, 33 bp, Homo sapiens
gaagataaatccaatgcatatggagcagtggaa

SEQ ID NO: 41762 - DNA, 33 bp, Homo sapiens
acccacaattaaggtaaaatctggtcacataac

SEQ ID NO: 41763 - DNA, 33 bp, Homo sapiens
ttgcctagcaatcatacctgttccttaaaagga

SEQ ID NO: 41764 - DNA, 33 bp, Homo sapiens
cgcaggaagccaacggcacttaccaatcagtgt

SEQ ID NO: 41765 - DNA, 33 bp, Homo sapiens
ctgtctgaaattttgggattagtcagaagcaga

SEQ ID NO: 41766 - DNA, 33 bp, Homo sapiens
ctaaacagtggtaaaacgagattatgtacaggt

SEQ ID NO: 41767 - DNA, 33 bp, Homo sapiens
tagaagaaaatggcaactaagagtgcaaagcac

SEQ ID NO: 41768 - DNA, 33 bp, Homo sapiens
taatgtagtcattaagcccttcccctacaatcc

SEQ ID NO: 41769 - DNA, 33 bp, Homo sapiens
ttcgaaaagataaagacgatacaacatgagaaa

SEQ ID NO: 41770 - DNA, 33 bp, Homo sapiens
atgatggaggagatgcccatatcaatgactgag

SEQ ID NO: 41771 - DNA, 33 bp, Homo sapiens
tggttggcaatcaatcaaactcattataccacg

SEQ ID NO: 41772 - DNA, 33 bp, Homo sapiens
ctgaaatcttttctcaaccaggtttgctaatcc

SEQ ID NO: 41773 - DNA, 33 bp, Homo sapiens
aataaataattttccaccgatattggacatgag

SEQ ID NO: 41774 - DNA, 33 bp, Homo sapiens
atgatagagccattcaaggtgtctcaatagctc

SEQ ID NO: 41775 - DNA, 33 bp, Homo sapiens
ttcttatctgtttaacactgccataattaagtg

SEQ ID NO: 41776 - DNA, 33 bp, Homo sapiens
acaaaactaaacataccattgccatacagtcca

SEQ ID NO: 41777 - DNA, 33 bp, Homo sapiens
tgtaatctgaatgaaccgagcaaactctaaaca

SEQ ID NO: 41778 - DNA, 51 bp, Homo sapiens
cacgttctcgttgtagccacattacacctttgcattactcttttgccactg

SEQ ID NO: 41779 - DNA, 33 bp, Homo sapiens
ttttaaagatccattccattttacctgacccac

SEQ ID NO: 41780 - DNA, 33 bp, Homo sapiens
ctactgtcaatagtaacggcaaaggcctattat

SEQ ID NO: 41781 - DNA, 33 bp, Homo sapiens
cagttctttccaaaagccaaggtgaatcctctg

SEQ ID NO: 41782 - DNA, 33 bp, Homo sapiens
ctgggtgtgggagtgaaggcatccctgttttat

SEQ ID NO: 41783 - DNA, 33 bp, Homo sapiens
tgttctatatgatttacggacataacagcccac

SEQ ID NO: 41784 - DNA, 33 bp, Homo sapiens
aaagttacctttggaactggaacaaagctccaa

SEQ ID NO: 41785 - DNA, 33 bp, Homo sapiens
tgagccttaaattccagtagggaagagagccaa

SEQ ID NO: 41786 - DNA, 33 bp, Homo sapiens
tttctgtagcacttaactcatggtaagcaaaaa

SEQ ID NO: 41787 - DNA, 33 bp, Homo sapiens
accaaagatgctcaataaaagcagcacagctga

SEQ ID NO: 41788 - DNA, 33 bp, Homo sapiens
tatgacgtatgcagcaagttaatcacggccagg

SEQ ID NO: 41789 - DNA, 33 bp, Homo sapiens
tccaaatcttactaaaactcagaaagcagtgga

SEQ ID NO: 41790 - DNA, 33 bp, Homo sapiens
gtcttggggtatgaccacaatctgtccaaaaaa

SEQ ID NO: 41791 - DNA, 33 bp, Homo sapiens
tggatacttaacatctaaactgaggcagttaat

SEQ ID NO: 41792 - DNA, 33 bp, Homo sapiens
taccatttattagaccaaccactctcaaattgc

SEQ ID NO: 41793 - DNA, 33 bp, Homo sapiens
atttctttttgtgcaccggatgtcctataatgt

SEQ ID NO: 41794 - DNA, 51 bp, Homo sapiens
ctagaagataaagataacatggtaaatattgacagaggataaccgttatct

SEQ ID NO: 41795 - DNA, 51 bp, Homo sapiens
tagaggattttcagattgcaagggtcaacaaataacagttaaaatggaatg

SEQ ID NO: 41796 - DNA, 51 bp, Homo sapiens
ataaattacagttatttgatggatgaagatcttgtgctaagacttgggctc

SEQ ID NO: 41797 - DNA, 33 bp, Homo sapiens
gcgagtactgaaccagccgtattcacctttgaa

SEQ ID NO: 41798 - DNA, 33 bp, Homo sapiens
ctctgcaaacttaccaagaggcttatggtggat

SEQ ID NO: 41799 - DNA, 33 bp, Homo sapiens
cttatctgaccacaaagttatgattcagaaaga

SEQ ID NO: 41800 - DNA, 33 bp, Homo sapiens
tgcatgaataggttatcaaaagtaccatcaagt

SEQ ID NO: 41801 - DNA, 33 bp, Homo sapiens
tgcaccaggataatcagatggaagaagccttac

SEQ ID NO: 41802 - DNA, 33 bp, Homo sapiens
gagtcatgaatgttggcatagcaggaaaaacct

SEQ ID NO: 41803 - DNA, 51 bp, Homo sapiens
gtgacgtgacatcacttgaaaacacgaaagcctcatcatttaccaggttgg

SEQ ID NO: 41804 - DNA, 33 bp, Homo sapiens
gagtgagtcactgtcacggttattggtccaatc

SEQ ID NO: 41805 - DNA, 33 bp, Homo sapiens
atgacaatgatttcaacatacagttaagaaaaa

SEQ ID NO: 41806 - DNA, 33 bp, Homo sapiens
ggtggccgttgctgtaaaattgctcgtatattg

SEQ ID NO: 41807 - DNA, 33 bp, Homo sapiens
ctctgctgtgaaatcaataaagaatagtgataa

SEQ ID NO: 41808 - DNA, 33 bp, Homo sapiens
gaacttaaaagtttacaaaaggccatattaatg

SEQ ID NO: 41809 - DNA, 33 bp, Homo sapiens
aaaaatttctgactgacgtgttattagctcatt

SEQ ID NO: 41810 - DNA, 33 bp, Homo sapiens
gtctcatggctgacaccgatcaaaacaaaggaa

SEQ ID NO: 41811 - DNA, 51 bp, Homo sapiens
ataattctacaggtggtgagagtgacgaaatagaatacaattttgttatga

SEQ ID NO: 41812 - DNA, 33 bp, Homo sapiens
gccatacaattgataccgaaattaaccagacaa

SEQ ID NO: 41813 - DNA, 33 bp, Homo sapiens
aatggatagattgaataagcgtctgaaattcta

SEQ ID NO: 41814 - DNA, 33 bp, Homo sapiens
acatgaaatacacaccaaggaacactacaaagc

SEQ ID NO: 41815 - DNA, 33 bp, Homo sapiens
gttatggtagccctagcaaacaaatatgcttac

SEQ ID NO: 41816 - DNA, 33 bp, Homo sapiens
tgctaggaagcaggcactcatttcaggacttca

SEQ ID NO: 41817 - DNA, 33 bp, Homo sapiens
tggttagcctctgataaaaattgtctcttagca

SEQ ID NO: 41818 - DNA, 33 bp, Homo sapiens
agtaaaatataggaacagaaagcacattagtgt

SEQ ID NO: 41819 - DNA, 33 bp, Homo sapiens
ggtactgactttgaacaatagacaatactttca

SEQ ID NO: 41820 - DNA, 33 bp, Homo sapiens
tgtcagaaacagtgataagaaatttttattcag

SEQ ID NO: 41821 - DNA, 33 bp, Homo sapiens
taatggttgccagtaactctcttctccctccat

SEQ ID NO: 41822 - DNA, 33 bp, Homo sapiens
ttcaaatcaccatacaacaggaatcaatacaaa

SEQ ID NO: 41823 - DNA, 33 bp, Homo sapiens
catgatgactgacctaccgtatttccaaagaca

SEQ ID NO: 41824 - DNA, 33 bp, Homo sapiens
tgaaacagcttccaagcagtgagctaaacaagt

SEQ ID NO: 41825 - DNA, 33 bp, Homo sapiens
gataggctataattacaaagattgatcatatcg

SEQ ID NO: 41826 - DNA, 51 bp, Homo sapiens
taaacacgtgccatggtgatttgctatatagatcaacctgtcacttaggta

SEQ ID NO: 41827 - DNA, 51 bp, Homo sapiens
aaaaaataataaggaacatagttgaagattgaactttgaggaactccaaca

SEQ ID NO: 41828 - DNA, 51 bp, Homo sapiens
aatatcattttattctgctatatgaggtataaaatttcattctgggcttaa

SEQ ID NO: 41829 - DNA, 33 bp, Homo sapiens
tctttatggggtcaccagagtaccatatttcca

SEQ ID NO: 41830 - DNA, 33 bp, Homo sapiens
cacaatcctgacttctaacatggattaatttaa

SEQ ID NO: 41831 - DNA, 33 bp, Homo sapiens
aaattttccaagtgataagaaataataccacac

SEQ ID NO: 41832 - DNA, 51 bp, Homo sapiens
ggagattggcattgaacccaagacaaccttaatttctcaatatctctataa

SEQ ID NO: 41833 - DNA, 51 bp, Homo sapiens
taccatgactgcatttgtcaaggaagaaatgggttaatgttaggaagccag

SEQ ID NO: 41834 - DNA, 51 bp, Homo sapiens
tttcaatattagcctccattttgccaaaaccttctcaaaggggcaggtgaa

SEQ ID NO: 41835 - DNA, 33 bp, Homo sapiens
catagtgattacactacgtttttctaaccactt

SEQ ID NO: 41836 - DNA, 33 bp, Homo sapiens
gctatggcagtcatcaaatcattcctctattgt

SEQ ID NO: 41837 - DNA, 33 bp, Homo sapiens
gtgtctcctcatgctaacctatgtccttttatc

SEQ ID NO: 41838 - DNA, 33 bp, Homo sapiens
gtacaccatatcaccaatgaagtgttcttgtca

SEQ ID NO: 41839 - DNA, 33 bp, Homo sapiens
gaaaatcatacatatacgccaaccttccttgtt

SEQ ID NO: 41840 - DNA, 33 bp, Homo sapiens
gtacatgcaaatacagcctaagcccatctccct

SEQ ID NO: 41841 - DNA, 33 bp, Homo sapiens
atatgaaattaatacaatgctttatgtgtttga

SEQ ID NO: 41842 - DNA, 51 bp, Homo sapiens
tttttaggtaaaactctttcaataaacacagtcattataccgttaaaaaaa

SEQ ID NO: 41843 - DNA, 33 bp, Homo sapiens
gcggtcagagcaccaaacttacgagccttgtga

SEQ ID NO: 41844 - DNA, 33 bp, Homo sapiens
ttctcagtgcctaatgcagtggcagatgcatct

SEQ ID NO: 41845 - DNA, 51 bp, Homo sapiens
agaggtgctcaacatgtagtataaccgtctttctgttccacattaatctcc

SEQ ID NO: 41846 - DNA, 33 bp, Homo sapiens
atgatagacatcctagaataaaatgaacatagg

SEQ ID NO: 41847 - DNA, 51 bp, Homo sapiens
catgagaatcacatttccctttgtgcatctctgagaattggagaataagat

SEQ ID NO: 41848 - DNA, 33 bp, Homo sapiens
atcaacacaatgcacaaggcagaacattagaaa

SEQ ID NO: 41849 - DNA, 51 bp, Homo sapiens
agagcagaagagggtcagcatggacaaacatcggagcaggaagaccaggaa

SEQ ID NO: 41850 - DNA, 33 bp, Homo sapiens
tttatgaatcttcaaaaatagaacagacatgaa

SEQ ID NO: 41851 - DNA, 33 bp, Homo sapiens
gacaaatgacatatcagccaatcttcaatgagc

SEQ ID NO: 41852 - DNA, 33 bp, Homo sapiens
agaggttaagtgattccaagtatttcacacagc

SEQ ID NO: 41853 - DNA, 33 bp, Homo sapiens
acagagcacagaactcacgctaagaaatgtctg

SEQ ID NO: 41854 - DNA, 33 bp, Homo sapiens
ttctgtgtcttccactcagaataaaggctgctg

SEQ ID NO: 41855 - DNA, 33 bp, Homo sapiens
aagtcaaacaagtgtcgattcgggttccagagt

SEQ ID NO: 41856 - DNA, 33 bp, Homo sapiens
gcctgattgtagaacccgaactcttcttgtcat

SEQ ID NO: 41857 - DNA, 33 bp, Homo sapiens
cataaagcaccaaagaagacttttcaaagttgt

SEQ ID NO: 41858 - DNA, 33 bp, Homo sapiens
ctcatccctgaaaaaaacattgttcacacacac

SEQ ID NO: 41859 - DNA, 33 bp, Homo sapiens
ttgtgcagttgactcactgaaaggcaaaggaag

SEQ ID NO: 41860 - DNA, 33 bp, Homo sapiens
aagcagatgggaaacgaaatcttagaagaaaca

SEQ ID NO: 41861 - DNA, 33 bp, Homo sapiens
tgtagatgtaggtagtcaagatcaggtcatgct

SEQ ID NO: 41862 - DNA, 33 bp, Homo sapiens
gtccttgaaacaggcacaacatcttacatgcct

SEQ ID NO: 41863 - DNA, 33 bp, Homo sapiens
gcaactggatagacacaggactttaaacgcaca

SEQ ID NO: 41864 - DNA, 33 bp, Homo sapiens
gatatacttaactctacggcagataactatttg

SEQ ID NO: 41865 - DNA, 33 bp, Homo sapiens
atggccttgctcttacacactactctttatcta

SEQ ID NO: 41866 - DNA, 33 bp, Homo sapiens
tctagacaatcttgacaaaaaatcttcattctc

SEQ ID NO: 41867 - DNA, 33 bp, Homo sapiens
tgtgttaaacttgcgtaaacttcaaatattaat

SEQ ID NO: 41868 - DNA, 33 bp, Homo sapiens
aattacagcaacattgccttccagtgtgcatct

SEQ ID NO: 41869 - DNA, 33 bp, Homo sapiens
taatggaatcatataacctgtgaccttttgtga

SEQ ID NO: 41870 - DNA, 33 bp, Homo sapiens
ggtagccacaatagcaaatatagaacatttcca

SEQ ID NO: 41871 - DNA, 33 bp, Homo sapiens
ccttctttccacgtctctcagtttctgtgtcaa

SEQ ID NO: 41872 - DNA, 33 bp, Homo sapiens
gctcatggtttgtttacaccactccccactccc

SEQ ID NO: 41873 - DNA, 33 bp, Homo sapiens
agtaggcaacagaaaccctgaaatggtgggaca

SEQ ID NO: 41874 - DNA, 33 bp, Homo sapiens
gtttctattaaggatcaaggtacagagggtaga

SEQ ID NO: 41875 - DNA, 33 bp, Homo sapiens
ggcaggagagttaggcaaatacagcatctttga

SEQ ID NO: 41876 - DNA, 33 bp, Homo sapiens
ggtttacaaatggctacccataaaaaatacaac

SEQ ID NO: 41877 - DNA, 33 bp, Homo sapiens
ttaagcccatctaaaaagctaatgcaaattccc

SEQ ID NO: 41878 - DNA, 51 bp, Homo sapiens
ggtagtgggaaaagacatagttcccaaattcttctggagtctatagtgtaa

SEQ ID NO: 41879 - DNA, 33 bp, Homo sapiens
caaaatcttcacaatacggtcaacttcctttcc

SEQ ID NO: 41880 - DNA, 33 bp, Homo sapiens
actgtctagcacagaaccaaacaatgaaatgtt

SEQ ID NO: 41881 - DNA, 51 bp, Homo sapiens
ttgaataatggtctataacctctaactgccagacatttgccataccagttt

SEQ ID NO: 41882 - DNA, 51 bp, Homo sapiens
atataacctaggaatgaccctaaaacgaagagaaaataatcttactttttg

SEQ ID NO: 41883 - DNA, 33 bp, Homo sapiens
agagtgctcatatcacagaggcacgtaagtcat

SEQ ID NO: 41884 - DNA, 33 bp, Homo sapiens
ctacccctatcaatagaaatcaggtatgctggc

SEQ ID NO: 41885 - DNA, 33 bp, Homo sapiens
atgctggcgggacgtacagtaatttaaccagag

SEQ ID NO: 41886 - DNA, 33 bp, Homo sapiens
tcttacactaaagcaactgtttgctgatttggg

SEQ ID NO: 41887 - DNA, 33 bp, Homo sapiens
tatataaaatgagaaacatgagttcatatatcc

SEQ ID NO: 41888 - DNA, 33 bp, Homo sapiens
ctgagacacaattcccacttgacagcaaacaaa

SEQ ID NO: 41889 - DNA, 33 bp, Homo sapiens
caagaaaagaaggtgaaaagcatcactcagtta

SEQ ID NO: 41890 - DNA, 33 bp, Homo sapiens
gctggtacttcacaatcataccctgttgtaaca

SEQ ID NO: 41891 - DNA, 33 bp, Homo sapiens
taccacatcaggtgaaacatccaaacaagagaa

SEQ ID NO: 41892 - DNA, 51 bp, Homo sapiens
ttggcaggtcggtctaagggtcctcaatagtagatgctagtggtggctatt

SEQ ID NO: 41893 - DNA, 51 bp, Homo sapiens
tttaaactttagtatacaagaaataccactaggttgtgttaagatgtaagt

SEQ ID NO: 41894 - DNA, 51 bp, Homo sapiens
ctattgtaagtctactctttctatagaattcctggaaattatacaatgtct

SEQ ID NO: 41895 - DNA, 33 bp, Homo sapiens
gcccactgaaacagacaaaaaacaacaggaaat

SEQ ID NO: 41896 - DNA, 33 bp, Homo sapiens
tcctggagtctcaaggaaatgaaggctgctgac

SEQ ID NO: 41897 - DNA, 33 bp, Homo sapiens
cttttcaggctcttcccaaaccataaacaacat

SEQ ID NO: 41898 - DNA, 33 bp, Homo sapiens
cttttttgaataaatgaactgaactgaaaaaga

SEQ ID NO: 41899 - DNA, 51 bp, Homo sapiens
gctattaaggaactagagttgataaataaatgtgtataggttccttttgca

SEQ ID NO: 41900 - DNA, 33 bp, Homo sapiens
tgatgaatacatacaaactaatttgctaaaact

SEQ ID NO: 41901 - DNA, 33 bp, Homo sapiens
ctcgtgtaattttcacaagaatctccctcattt

SEQ ID NO: 41902 - DNA, 33 bp, Homo sapiens
gtttcctaagacaaagcccatgaaactagaaac

SEQ ID NO: 41903 - DNA, 33 bp, Homo sapiens
aggagagaatcttgaaatgacagactatttatt

SEQ ID NO: 41904 - DNA, 33 bp, Homo sapiens
agggtatgtgatctgccgaacaatcagtaattt

SEQ ID NO: 41905 - DNA, 33 bp, Homo sapiens
aatttttacaaagtgaacaaacccatgtaacaa

SEQ ID NO: 41906 - DNA, 33 bp, Homo sapiens
ctccaacttaaaaaccagatctttgtcttactc

SEQ ID NO: 41907 - DNA, 33 bp, Homo sapiens
gtgtagttctgctagacatgagttgacagacct

SEQ ID NO: 41908 - DNA, 33 bp, Homo sapiens
ctggcaacagctctcaacatttaaggactcaat

SEQ ID NO: 41909 - DNA, 51 bp, Homo sapiens
caacaaaaatcttaatgggtaattccaatgtacaactaagttttaatatca

SEQ ID NO: 41910 - DNA, 51 bp, Homo sapiens
atatttcagcacaacacaaccggacagctaactaagattatgttttgacct

SEQ ID NO: 41911 - DNA, 51 bp, Homo sapiens
ttcctagatcaagccatactcacaaagactaagacactgtgacagagacta

SEQ ID NO: 41912 - DNA, 33 bp, Homo sapiens
gatgataccatttagaatatcccatgagaagtg

SEQ ID NO: 41913 - DNA, 51 bp, Homo sapiens
aaccagctgaggctagcccaaattgctgacccataaaatcataaacaaata

SEQ ID NO: 41914 - DNA, 51 bp, Homo sapiens
gcaatgtggtcatatgttcctaagaagcacaattattgaaaactttaatta

SEQ ID NO: 41915 - DNA, 51 bp, Homo sapiens
cctccacacacaaacaggaagtacacctgcctgcttaccgtacacagacag

SEQ ID NO: 41916 - DNA, 33 bp, Homo sapiens
catatacctatttataagctaaatctgactcac

SEQ ID NO: 41917 - DNA, 33 bp, Homo sapiens
cacacttgtatctgccacaaaagcctcacattg

SEQ ID NO: 41918 - DNA, 33 bp, Homo sapiens
cacagtgcccttttgaacttgaaaagaagagga

SEQ ID NO: 41919 - DNA, 33 bp, Homo sapiens
tccctgattccctgacacatattttaccatgct

SEQ ID NO: 41920 - DNA, 33 bp, Homo sapiens
agaggaaactcattgactatacaggagaccaca

SEQ ID NO: 41921 - DNA, 33 bp, Homo sapiens
tatattacagcatctacgagtcgataaatttat

SEQ ID NO: 41922 - DNA, 33 bp, Homo sapiens
tggcatccttcaatcactgaggactatttagaa

SEQ ID NO: 41923 - DNA, 33 bp, Homo sapiens
tttgcctatgtatgtaaccttccagaaaatgta

SEQ ID NO: 41924 - DNA, 33 bp, Homo sapiens
gattgcaaaatacaatcatcgcttgccaatagg

SEQ ID NO: 41925 - DNA, 33 bp, Homo sapiens
atctggaaattgaggaagtcttatggtggagaa

SEQ ID NO: 41926 - DNA, 33 bp, Homo sapiens
ataacccaataaaaaacctgctaacaaaagtgc

SEQ ID NO: 41927 - DNA, 33 bp, Homo sapiens
aaagcttgatcattaaaaaaacggcctaatttc

SEQ ID NO: 41928 - DNA, 33 bp, Homo sapiens
cacagggcttcaaaaacgtctatgctatccttc

SEQ ID NO: 41929 - DNA, 33 bp, Homo sapiens
ctccaccagggctttaactccttgacggaaacg

SEQ ID NO: 41930 - DNA, 33 bp, Homo sapiens
gacattaatcacacaggatgcatagaggaataa

SEQ ID NO: 41931 - DNA, 33 bp, Homo sapiens
ccttttataacatcaaatatggtccagaattca

SEQ ID NO: 41932 - DNA, 33 bp, Homo sapiens
tctggttagccctgaccgatacagcagttacag

SEQ ID NO: 41933 - DNA, 33 bp, Homo sapiens
ctgacacctcaatcatgactggatctgctgggt

SEQ ID NO: 41934 - DNA, 33 bp, Homo sapiens
actactgcattatcccaagaaattctctatatc

SEQ ID NO: 41935 - DNA, 33 bp, Homo sapiens
ttaattaacatgtgtccagtattttttgagaaa

SEQ ID NO: 41936 - DNA, 33 bp, Homo sapiens
attaagcaatctctggaatgtttcttctttttt

SEQ ID NO: 41937 - DNA, 51 bp, Homo sapiens
tcaactgaacagatatttattgagaacctagtgtgtacaaagtatgctgcc

SEQ ID NO: 41938 - DNA, 33 bp, Homo sapiens
acaaaatcgatttgcacaaattactagcattcc

SEQ ID NO: 41939 - DNA, 33 bp, Homo sapiens
gtctcctggataataacagatagtgattggctc

SEQ ID NO: 41940 - DNA, 51 bp, Homo sapiens
tcaggaaaacatgagctcaccaaacatactaaatgaggtaccattgaccaa

SEQ ID NO: 41941 - DNA, 51 bp, Homo sapiens
tacaaggaatataggtagctgatgaccttcacctttaggatccaccacaac

SEQ ID NO: 41942 - DNA, 33 bp, Homo sapiens
tagctactcctttggccgcatctgttcagaagt

SEQ ID NO: 41943 - DNA, 33 bp, Homo sapiens
agttaaagtaagaaaaggcaccaccaattataa

SEQ ID NO: 41944 - DNA, 33 bp, Homo sapiens
tagaaatcacctaagacggcagagattgagctg

SEQ ID NO: 41945 - DNA, 51 bp, Homo sapiens
gtgaatatacaaagtgatagaattaaaccaactgtaagaatgaacagatct

SEQ ID NO: 41946 - DNA, 51 bp, Homo sapiens
cttttttttacactatgaagcaacaatgttctctaaatagcagggtgcttt

SEQ ID NO: 41947 - DNA, 33 bp, Homo sapiens
gattgaaaagagatagaaagaatgtgtggcaag

SEQ ID NO: 41948 - DNA, 33 bp, Homo sapiens
ggaagctcaattttaacctcatcatagaactct

SEQ ID NO: 41949 - DNA, 33 bp, Homo sapiens
gcatttcttttcacccagacacttgctttcaaa

SEQ ID NO: 41950 - DNA, 33 bp, Homo sapiens
aaaatgttagtgattacgccaatgttaacatcc

SEQ ID NO: 41951 - DNA, 33 bp, Homo sapiens
gccagatgattctgtccaagcgtaggctaatgt

SEQ ID NO: 41952 - DNA, 33 bp, Homo sapiens
ctatagaatagtgcaaatgagcaggacttttct

SEQ ID NO: 41953 - DNA, 51 bp, Homo sapiens
ttttccaacacagcactttatgaaggagaactggagcattaagataaaata

SEQ ID NO: 41954 - DNA, 51 bp, Homo sapiens
tgtctggtatcctagagcagatccacgttgccatttgaaatcattgatgta

SEQ ID NO: 41955 - DNA, 33 bp, Homo sapiens
ttgttgttgtttttgacagacagcttgtaggga

SEQ ID NO: 41956 - DNA, 51 bp, Homo sapiens
atggtatgtttacattccaaggcataaacttgttaaaattacaattaatct

SEQ ID NO: 41957 - DNA, 33 bp, Homo sapiens
tattttaagtccaagtaaacctcctggaaaaga

SEQ ID NO: 41958 - DNA, 33 bp, Homo sapiens
ttgggttgtggacttacctgggggcagttactt

SEQ ID NO: 41959 - DNA, 33 bp, Homo sapiens
agcaattgcactcacaataacatcaaaaattta

SEQ ID NO: 41960 - DNA, 33 bp, Homo sapiens
tcaacaaatacgccagaaaagctactatctcat

SEQ ID NO: 41961 - DNA, 33 bp, Homo sapiens
tttagtacaaggttgacgggaatgtgagttagc

SEQ ID NO: 41962 - DNA, 33 bp, Homo sapiens
ctcattttatctttgcagaaactccttgcagta

SEQ ID NO: 41963 - DNA, 33 bp, Homo sapiens
tagttatacagtttggaattctaatcccaagtt

SEQ ID NO: 41964 - DNA, 33 bp, Homo sapiens
agcaaacaacaatatacagcctagcaacattat

SEQ ID NO: 41965 - DNA, 33 bp, Homo sapiens
aggaaatgtaaaaggacacagtgcaatacagtc

SEQ ID NO: 41966 - DNA, 33 bp, Homo sapiens
cctcacaatgaatcaacgaaatggaaattaaaa

SEQ ID NO: 41967 - DNA, 51 bp, Homo sapiens
atttcatttcattctccagtttacacgtttagaaataagagtcctgaagac

SEQ ID NO: 41968 - DNA, 51 bp, Homo sapiens
ttgtcattcacatacacttgcaatgccaaataaatgtatgttgaagagaag

SEQ ID NO: 41969 - DNA, 33 bp, Homo sapiens
agtaactagtatactacagtgctcacagaccac

SEQ ID NO: 41970 - DNA, 33 bp, Homo sapiens
aatttgataccaaatacgcctctagtagtcccg

SEQ ID NO: 41971 - DNA, 33 bp, Homo sapiens
tgataatagctagtacaaaggatgcacaaagtg

SEQ ID NO: 41972 - DNA, 33 bp, Homo sapiens
taatatgaacaacaaaggggctaagttgaaagg

SEQ ID NO: 41973 - DNA, 51 bp, Homo sapiens
acctctaaagaatgtataagagaggcaattaaatagtaatggtagggaaaa

SEQ ID NO: 41974 - DNA, 33 bp, Homo sapiens
gtagaaacttgtagaacgtgggatttgctgaga

SEQ ID NO: 41975 - DNA, 51 bp, Homo sapiens
caatcaagaccctggacacaaatgacggtctttgcatatcattttagcctt

SEQ ID NO: 41976 - DNA, 51 bp, Homo sapiens
caggtacctttcattcatcttcatcaatatccctagtatctaccctcttgt

SEQ ID NO: 41977 - DNA, 33 bp, Homo sapiens
ttctttcagaagatgcaagagtttattcatact

SEQ ID NO: 41978 - DNA, 33 bp, Homo sapiens
agaggtatgagagcagcatagttcattcctgat

SEQ ID NO: 41979 - DNA, 33 bp, Homo sapiens
tttcagtcagagagaacaggacaccgaaagtaa

SEQ ID NO: 41980 - DNA, 33 bp, Homo sapiens
gaggctaaaaagtaaaatatggtgggatagaca

SEQ ID NO: 41981 - DNA, 33 bp, Homo sapiens
ctataaaaatctagacaaaaacatggaagaaat

SEQ ID NO: 41982 - DNA, 33 bp, Homo sapiens
tcatttctgtatctggaagaaaatagatgcatt

SEQ ID NO: 41983 - DNA, 33 bp, Homo sapiens
tatttggatagtaaaagtaatgcataacaaata

SEQ ID NO: 41984 - DNA, 33 bp, Homo sapiens
actcttacttgcttaaatagaacttttgctgga

SEQ ID NO: 41985 - DNA, 33 bp, Homo sapiens
atacctacaactagaactgctgagtaagagtag

SEQ ID NO: 41986 - DNA, 33 bp, Homo sapiens
ctttagtaactaagcaagcataagtcagagtta

SEQ ID NO: 41987 - DNA, 33 bp, Homo sapiens
acctgcataagttaacagtaaaatcaactcttt

SEQ ID NO: 41988 - DNA, 33 bp, Homo sapiens
ggctcagctacaaagaacagtaagtcttgcttt

SEQ ID NO: 41989 - DNA, 33 bp, Homo sapiens
ttagattgattctagaaactcacagatgtaata

SEQ ID NO: 41990 - DNA, 33 bp, Homo sapiens
tgctgggtttcagcaaaaacttacttgtcagtt

SEQ ID NO: 41991 - DNA, 33 bp, Homo sapiens
tactaaggtctagttggactgttccagtaggat

SEQ ID NO: 41992 - DNA, 33 bp, Homo sapiens
catctcattcatgacacaagagccctcgtgact

SEQ ID NO: 41993 - DNA, 33 bp, Homo sapiens
cctagatattcagtgaaattggaagagttagat

SEQ ID NO: 41994 - DNA, 33 bp, Homo sapiens
atacattcttataagagtcatctccaatgtgca

SEQ ID NO: 41995 - DNA, 33 bp, Homo sapiens
agaaataccataaatacgaagacgtggcaaaaa

SEQ ID NO: 41996 - DNA, 33 bp, Homo sapiens
agggtttcctaacataaccaatcagcttgcaat

SEQ ID NO: 41997 - DNA, 33 bp, Homo sapiens
gaagggacgaggaagaacaatgacacttctctg

SEQ ID NO: 41998 - DNA, 33 bp, Homo sapiens
tcctatagccagtaaaaagtagtatgtggtggt

SEQ ID NO: 41999 - DNA, 51 bp, Homo sapiens
gaggttatttggcatattccactcacctaaaagcatttttccttcatacaa

SEQ ID NO: 42000 - DNA, 51 bp, Homo sapiens
atctgatttagctaagatgctttaccgacaggatatcctgtatctagttaa

SEQ ID NO: 42001 - DNA, 33 bp, Homo sapiens
cattaaatattaatcgaatgaatgagtgtgttg

SEQ ID NO: 42002 - DNA, 33 bp, Homo sapiens
ggtattctgtggcataataacacgtgtcacaca

SEQ ID NO: 42003 - DNA, 51 bp, Homo sapiens
tggataagagactggacccattcgacgcaatcagagagcatctcctggaga

SEQ ID NO: 42004 - DNA, 51 bp, Homo sapiens
ccttgatgatgtgagtgaccttcagaagacctggtgcactcacttggcaca

SEQ ID NO: 42005 - DNA, 51 bp, Homo sapiens
gtaacaagaaccagctgctaggaaacaggtcccagttatgtatgaaactcc

SEQ ID NO: 42006 - DNA, 51 bp, Homo sapiens
ggttcttgttaccagggatgtaaataatgaaaataaaatttttgccttttg

SEQ ID NO: 42007 - DNA, 33 bp, Homo sapiens
aggaggcattattgatcagcggtgtaggtattc

SEQ ID NO: 42008 - DNA, 33 bp, Homo sapiens
gggagggagttacgtacgggaacaatgacagga

SEQ ID NO: 42009 - DNA, 51 bp, Homo sapiens
atggacaaaagaggactgaattacaaaagccggaagaaaagagaatgttga

SEQ ID NO: 42010 - DNA, 33 bp, Homo sapiens
aagatgttcaacctagaaaattggctaaataaa

SEQ ID NO: 42011 - DNA, 33 bp, Homo sapiens
gcccacacatcaggaacagtcccacagcatgag

SEQ ID NO: 42012 - DNA, 33 bp, Homo sapiens
acaataataacagcaacgatggcttctgcttat

SEQ ID NO: 42013 - DNA, 33 bp, Homo sapiens
acactctcctgtgaaaattctacctaatgggta

SEQ ID NO: 42014 - DNA, 33 bp, Homo sapiens
ggtgtaccttcaggcaaaggtaggcttcaacaa

SEQ ID NO: 42015 - DNA, 33 bp, Homo sapiens
tgattgttatggcccaacattaatcataggtgc

SEQ ID NO: 42016 - DNA, 33 bp, Homo sapiens
aaggagttctcaaacacaatcttcttcgacaga

SEQ ID NO: 42017 - DNA, 33 bp, Homo sapiens
gacttctgaaggaagacgataagccaacccatt

SEQ ID NO: 42018 - DNA, 33 bp, Homo sapiens
gttatgaacacaggaaatcatttaaaactgaga

SEQ ID NO: 42019 - DNA, 33 bp, Homo sapiens
aaaacatgattctaagaaggagaccataggctt

SEQ ID NO: 42020 - DNA, 33 bp, Homo sapiens
tgcagacacctcaacactgcatttctgttcatc

SEQ ID NO: 42021 - DNA, 33 bp, Homo sapiens
acctgagataggccaacggtaatcgagaaaggg

SEQ ID NO: 42022 - DNA, 33 bp, Homo sapiens
atgtctggaagttagaacaggactataccaaat

SEQ ID NO: 42023 - DNA, 33 bp, Homo sapiens
atcttagcaatgatgaactacttcaaggtcacc

SEQ ID NO: 42024 - DNA, 33 bp, Homo sapiens
cttttttccttatgcccgcttatctactcagtt

SEQ ID NO: 42025 - DNA, 33 bp, Homo sapiens
tagaattgtttggtacacagacattggtaacat

SEQ ID NO: 42026 - DNA, 33 bp, Homo sapiens
tttttctggctgtacccctaatactttgtctgg

SEQ ID NO: 42027 - DNA, 51 bp, Homo sapiens
accttttttcatgtcagcaaacacaaattttcatcatttttaatgttgaaa

SEQ ID NO: 42028 - DNA, 33 bp, Homo sapiens
gcattctttcagaggcaataggagaaattctat

SEQ ID NO: 42029 - DNA, 33 bp, Homo sapiens
cagtgaagattagagcaagttttcctgggctag

SEQ ID NO: 42030 - DNA, 33 bp, Homo sapiens
ttatgccattaaaaaaattgttacagtgggagc

SEQ ID NO: 42031 - DNA, 33 bp, Homo sapiens
taaaaaaatgaagatacgtgatagcaaagaaca

SEQ ID NO: 42032 - DNA, 33 bp, Homo sapiens
ttaacttctgagtagacggattaagtgacttct

SEQ ID NO: 42033 - DNA, 33 bp, Homo sapiens
tgaagcaggggcaggcaataccaagaacaagga

SEQ ID NO: 42034 - DNA, 33 bp, Homo sapiens
agcaccagattcaccaaaggaaatagatctaat

SEQ ID NO: 42035 - DNA, 33 bp, Homo sapiens
aaggatcatgtgaagaaaagaatcggtacaggg

SEQ ID NO: 42036 - DNA, 33 bp, Homo sapiens
agcagagaaatgccacaattagatcagagttag

SEQ ID NO: 42037 - DNA, 33 bp, Homo sapiens
ttgttactaatgataaatggtttctaagcacca

SEQ ID NO: 42038 - DNA, 33 bp, Homo sapiens
gagcccatagcggagaatcagagtgaaaacagg

SEQ ID NO: 42039 - DNA, 33 bp, Homo sapiens
ttcctgttttgtgacacgtatttctgtaggctg

SEQ ID NO: 42040 - DNA, 33 bp, Homo sapiens
cagggagagaaactggaaatgtgtttttccttg

SEQ ID NO: 42041 - DNA, 33 bp, Homo sapiens
tacacaagaaatgagcaaagagttcctggagaa

SEQ ID NO: 42042 - DNA, 33 bp, Homo sapiens
tccctaatgttacaaacgtgaagacaggttaaa

SEQ ID NO: 42043 - DNA, 33 bp, Homo sapiens
agtgttaccttaataacgcaaatagcatcatcg

SEQ ID NO: 42044 - DNA, 33 bp, Homo sapiens
ataacaacttaatttacatcacgtagaaaaact

SEQ ID NO: 42045 - DNA, 33 bp, Homo sapiens
aaccgaaattggaagcaaaagcagtcaggaact

SEQ ID NO: 42046 - DNA, 33 bp, Homo sapiens
gaaaatctgagttaaacgaactttgtgggggtt

SEQ ID NO: 42047 - DNA, 33 bp, Homo sapiens
ttggtgctgtcatgaacggtcccagggtaattt

SEQ ID NO: 42048 - DNA, 33 bp, Homo sapiens
tgctatttattatttccaaccatcttatttcag

SEQ ID NO: 42049 - DNA, 33 bp, Homo sapiens
attttttcctgtgaataatagagtggaggtgtc

SEQ ID NO: 42050 - DNA, 33 bp, Homo sapiens
tccccctttggaattacggcaaaaaggtgaact

SEQ ID NO: 42051 - DNA, 33 bp, Homo sapiens
accattatgttagggacgcttactcatcaattc

SEQ ID NO: 42052 - DNA, 33 bp, Homo sapiens
aggccacaagttgttgcatttggtgtaaaccag

SEQ ID NO: 42053 - DNA, 33 bp, Homo sapiens
aggaaagagttggtggaactagcttatcatgga

SEQ ID NO: 42054 - DNA, 33 bp, Homo sapiens
ttgtctttacttgtataaggcatcccaccagtg

SEQ ID NO: 42055 - DNA, 33 bp, Homo sapiens
catgctaactagaaagcagggaggtagacactg

SEQ ID NO: 42056 - DNA, 33 bp, Homo sapiens
acacagcaggaagtagaacatcaaataaacaac

SEQ ID NO: 42057 - DNA, 33 bp, Homo sapiens
accctatgtatactcaccgcttgtcctattgct

SEQ ID NO: 42058 - DNA, 33 bp, Homo sapiens
gtagctggaggactcacgatttctgtctcatgg

SEQ ID NO: 42059 - DNA, 33 bp, Homo sapiens
aggaagcgtcaggccaaagtttcggggctgccg

SEQ ID NO: 42060 - DNA, 33 bp, Homo sapiens
tatctaaaagctaccacctgtaggtaataagaa

SEQ ID NO: 42061 - DNA, 33 bp, Homo sapiens
cagttgcaaagtccttcaaaacaaagggagtac

SEQ ID NO: 42062 - DNA, 33 bp, Homo sapiens
tttgtcatatggaaaaatgattggtttcaaagt

SEQ ID NO: 42063 - DNA, 33 bp, Homo sapiens
ttggagaatttggaaacccagaaaaacatgatt

SEQ ID NO: 42064 - DNA, 33 bp, Homo sapiens
attttgtatgcttttacgaactgctgaagttaa

SEQ ID NO: 42065 - DNA, 33 bp, Homo sapiens
tgctagaagtacctggaaaatccctctgagccc

SEQ ID NO: 42066 - DNA, 33 bp, Homo sapiens
gcagtcaggtagatacacttcagccactgtctt

SEQ ID NO: 42067 - DNA, 33 bp, Homo sapiens
ggcaacacaagaataacgcacataataaataca

SEQ ID NO: 42068 - DNA, 33 bp, Homo sapiens
ttgatagaaaaagttcacaggccctggcttaag

SEQ ID NO: 42069 - DNA, 33 bp, Homo sapiens
aagtgggtaaagagtgaacagaggagttgaggt

SEQ ID NO: 42070 - DNA, 33 bp, Homo sapiens
tgggccctacctctcaagtgtctggttcggcag

SEQ ID NO: 42071 - DNA, 33 bp, Homo sapiens
aggtcacacagacagcaaaagtatctccagtgg

SEQ ID NO: 42072 - DNA, 33 bp, Homo sapiens
tctctactagatgagcaaaatacttttccctgg

SEQ ID NO: 42073 - DNA, 33 bp, Homo sapiens
cctgaggagaaagaaaacaggaatcgggtagat

SEQ ID NO: 42074 - DNA, 33 bp, Homo sapiens
tattgtcatatttcaccaatgagcaaactgaag

SEQ ID NO: 42075 - DNA, 33 bp, Homo sapiens
ttaaagtctctgcttagggatactgagaaaaaa

SEQ ID NO: 42076 - DNA, 33 bp, Homo sapiens
attaacaaggcagtgaagttaaagctacctatt

SEQ ID NO: 42077 - DNA, 33 bp, Homo sapiens
taacctgctttcctcaaatttgtattcctttcc

SEQ ID NO: 42078 - DNA, 33 bp, Homo sapiens
gatctacactggaaaaattgtagccaaatatag

SEQ ID NO: 42079 - DNA, 33 bp, Homo sapiens
acatgaaaagttgcaacgtcaagcaaaactgta

SEQ ID NO: 42080 - DNA, 33 bp, Homo sapiens
aagtaagaaaagctatcaatcagtttctcctta

SEQ ID NO: 42081 - DNA, 33 bp, Homo sapiens
ttacccacttttgaaacgtagctgccttgatct

SEQ ID NO: 42082 - DNA, 33 bp, Homo sapiens
tcctctctcctcaggacgtgtttactctgtggc

SEQ ID NO: 42083 - DNA, 33 bp, Homo sapiens
gagtgtttacatggccacaggtaattcattcag

SEQ ID NO: 42084 - DNA, 33 bp, Homo sapiens
ggcttgaacatagggcaaaggtaaatagaagat

SEQ ID NO: 42085 - DNA, 51 bp, Homo sapiens
atgtagctgaacttgatgttctaaacgtgacttttcaaaataaaataattt

SEQ ID NO: 42086 - DNA, 33 bp, Homo sapiens
gatcacctctttggccgcgagaaaagatgttcc

SEQ ID NO: 42087 - DNA, 33 bp, Homo sapiens
tcccattcactttggacaaatttcagagatttc

SEQ ID NO: 42088 - DNA, 33 bp, Homo sapiens
gttatcatgttagagaaaataacctgagttact

SEQ ID NO: 42089 - DNA, 33 bp, Homo sapiens
cgtgcagggctgatcaccactttaaactggagt

SEQ ID NO: 42090 - DNA, 33 bp, Homo sapiens
aggaggaggaagagataagtatgaagagcacag

SEQ ID NO: 42091 - DNA, 33 bp, Homo sapiens
catacctctgttatgaaattatgttctctctgc

SEQ ID NO: 42092 - DNA, 33 bp, Homo sapiens
ttcagtcatgagttgacggacatttaggttttt

SEQ ID NO: 42093 - DNA, 33 bp, Homo sapiens
atcagaccttactccacccagaatggccattat

SEQ ID NO: 42094 - DNA, 51 bp, Homo sapiens
agcgtttgctgacaaagtctctaatgatctcaggaccagtcagggtaattt

SEQ ID NO: 42095 - DNA, 33 bp, Homo sapiens
gtgctctgaaattttaggagtgttcatattagc

SEQ ID NO: 42096 - DNA, 51 bp, Homo sapiens
ctctcatgttaatgagaaaggatcgcatcattgtagctattatttataatg

SEQ ID NO: 42097 - DNA, 33 bp, Homo sapiens
gattcacactgaattacagcattggatgtgtag

SEQ ID NO: 42098 - DNA, 33 bp, Homo sapiens
cctactccttgtcatgcatggatctgttgttat

SEQ ID NO: 42099 - DNA, 33 bp, Homo sapiens
ttttcacaatattttgaaattgcaagtgattga

SEQ ID NO: 42100 - DNA, 33 bp, Homo sapiens
gaggccagaggaggataaataccatgaaacaga

SEQ ID NO: 42101 - DNA, 51 bp, Homo sapiens
aatttaaaaaccagaaatcaggctacggttccagctacacatttattggta

SEQ ID NO: 42102 - DNA, 33 bp, Homo sapiens
aaagtgtagggagtgaacaaatctttaaaacag

SEQ ID NO: 42103 - DNA, 33 bp, Homo sapiens
atattgtataatgcaacgtgtaaattttgtaaa

SEQ ID NO: 42104 - DNA, 33 bp, Homo sapiens
gcaacagcattactaaagttgtttgtggtggct

SEQ ID NO: 42105 - DNA, 33 bp, Homo sapiens
aaatgaggaccctgagaaattgagtgtttaccc

SEQ ID NO: 42106 - DNA, 51 bp, Homo sapiens
tattaaagatattccagtggaaaaactggcgaagctccaacctgtggtgac

SEQ ID NO: 42107 - DNA, 33 bp, Homo sapiens
ctatccgagttttcacagagtccaggagaaagt

SEQ ID NO: 42108 - DNA, 33 bp, Homo sapiens
ataattttcagagcccaatgcaagattaaaaag

SEQ ID NO: 42109 - DNA, 33 bp, Homo sapiens
tccaacttgtctaaaactgcaagaataagcttt

SEQ ID NO: 42110 - DNA, 33 bp, Homo sapiens
acacggtatggtggaaatagttctaaaataacc

SEQ ID NO: 42111 - DNA, 33 bp, Homo sapiens
aaaactaacagcttgaatacagtttgtcacact

SEQ ID NO: 42112 - DNA, 33 bp, Homo sapiens
aatgctttcctctctaaaccacgcggctcactt

SEQ ID NO: 42113 - DNA, 33 bp, Homo sapiens
gccaaccactattcagacagtttacccacaatg

SEQ ID NO: 42114 - DNA, 33 bp, Homo sapiens
actttctaagacatacaagaggagttgaaatta

SEQ ID NO: 42115 - DNA, 33 bp, Homo sapiens
gcagcttgctataaaactatgcaaaagattaag

SEQ ID NO: 42116 - DNA, 33 bp, Homo sapiens
cactctacatactctacggaatggccactcttc

SEQ ID NO: 42117 - DNA, 33 bp, Homo sapiens
aaaatatgtaaaacaacgtgaaatgcctatgga

SEQ ID NO: 42118 - DNA, 33 bp, Homo sapiens
cctctctttcttcttacagccttcctggatctt

SEQ ID NO: 42119 - DNA, 33 bp, Homo sapiens
tgtctgcaaaactttaccttgtgttccacttca

SEQ ID NO: 42120 - DNA, 33 bp, Homo sapiens
cacttaaaaattttcccaagtagcactgtttct

SEQ ID NO: 42121 - DNA, 33 bp, Homo sapiens
attctcatctggtctaaattgacttctaaaagg

SEQ ID NO: 42122 - DNA, 33 bp, Homo sapiens
taatacaagcagcagcaagaatttcaagtgcat

SEQ ID NO: 42123 - DNA, 33 bp, Homo sapiens
gtttccgtttggatctcaatgtgaacacagctg

SEQ ID NO: 42124 - DNA, 33 bp, Homo sapiens
ctttccaacaaacccaggaaggaggtactatta

SEQ ID NO: 42125 - DNA, 33 bp, Homo sapiens
gcgacatctgagaagagatctgaggaatgagaa

SEQ ID NO: 42126 - DNA, 33 bp, Homo sapiens
actttgtcatttcacactatacacaaacattaa

SEQ ID NO: 42127 - DNA, 33 bp, Homo sapiens
aagacaataggcaaacaactgtgtggaagcagg

SEQ ID NO: 42128 - DNA, 33 bp, Homo sapiens
aattagggatctaggccacctctatcttatagt

SEQ ID NO: 42129 - DNA, 33 bp, Homo sapiens
ggtataacacagcagaacccaattctaaaacct

SEQ ID NO: 42130 - DNA, 33 bp, Homo sapiens
tgtttggataacctcactcaataaatatcgtca

SEQ ID NO: 42131 - DNA, 33 bp, Homo sapiens
caagagtgatgaacagaaaagtgctaaagccag

SEQ ID NO: 42132 - DNA, 33 bp, Homo sapiens
ttcctccacatatatccgaacctcattttattt

SEQ ID NO: 42133 - DNA, 33 bp, Homo sapiens
caagccttgtgaaaacacactgttcctacccat

SEQ ID NO: 42134 - DNA, 33 bp, Homo sapiens
acactgatgtagcaatgaagcaaaacagtaaag

SEQ ID NO: 42135 - DNA, 33 bp, Homo sapiens
cagccaaacctaaatgcaaaccatgctgccaac

SEQ ID NO: 42136 - DNA, 33 bp, Homo sapiens
tctgtaagctttgttcacacaatgtcctttctg

SEQ ID NO: 42137 - DNA, 33 bp, Homo sapiens
aaaaactaaaaaacacagtcagacaataggcaa

SEQ ID NO: 42138 - DNA, 33 bp, Homo sapiens
ttttttcctattttgtaaaacctcagagacatc

SEQ ID NO: 42139 - DNA, 33 bp, Homo sapiens
agcaggttcagttcacaatgattttcaaattca

SEQ ID NO: 42140 - DNA, 33 bp, Homo sapiens
ggtgtaagtgcaaagcgaagatttgaattctaa

SEQ ID NO: 42141 - DNA, 33 bp, Homo sapiens
ctttgtgtttacatacaatcctataggtgcccc

SEQ ID NO: 42142 - DNA, 33 bp, Homo sapiens
ccccaacaacctggcaagagagtccctattctc

SEQ ID NO: 42143 - DNA, 33 bp, Homo sapiens
ggtctggaatatacaaactctcccagctctcat

SEQ ID NO: 42144 - DNA, 51 bp, Homo sapiens
catagcacgtccataacacaaatagacctcaggaggaatcgtgacatccag

SEQ ID NO: 42145 - DNA, 33 bp, Homo sapiens
ggtacattttaggatgacacagaaatgctgact

SEQ ID NO: 42146 - DNA, 33 bp, Homo sapiens
agcacagaatgaatccaatgtctgaaaatgtgc

SEQ ID NO: 42147 - DNA, 33 bp, Homo sapiens
aaatacagcaccacaaagttgtttaagccctcg

SEQ ID NO: 42148 - DNA, 33 bp, Homo sapiens
actgttcatcagcttcaagtaacaaacatacca

SEQ ID NO: 42149 - DNA, 33 bp, Homo sapiens
ctgcgaattcctgtcacaaatggagttttcctc

SEQ ID NO: 42150 - DNA, 33 bp, Homo sapiens
aatgctggtttctttaggccctaatagctgctg

SEQ ID NO: 42151 - DNA, 33 bp, Homo sapiens
aaatcttactcttcccgatgacttggctgagtg

SEQ ID NO: 42152 - DNA, 33 bp, Homo sapiens
atgataatgctaatacaagaatctccttgaaga

SEQ ID NO: 42153 - DNA, 33 bp, Homo sapiens
gacagctggaacattcacagtgctgtttcctta

SEQ ID NO: 42154 - DNA, 33 bp, Homo sapiens
tcattttcatgtcggccatagtttccatgccta

SEQ ID NO: 42155 - DNA, 33 bp, Homo sapiens
tcaaacactacaacatcagatcccagcttcccc

SEQ ID NO: 42156 - DNA, 33 bp, Homo sapiens
aagcaagtgagggtcaaacttaggttgtgtgag

SEQ ID NO: 42157 - DNA, 33 bp, Homo sapiens
gcttaacttttaaggaagtaccaaaatgttttc

SEQ ID NO: 42158 - DNA, 51 bp, Homo sapiens
aaaggtttatttataaattaggcacagtatagatgaacaataataactaat

SEQ ID NO: 42159 - DNA, 33 bp, Homo sapiens
ttgtaaagaggagacaatattttcatcattgaa

SEQ ID NO: 42160 - DNA, 33 bp, Homo sapiens
actgaaagtagcaaaccggatgcccgcagggga

SEQ ID NO: 42161 - DNA, 33 bp, Homo sapiens
ataggtgttatgtacaaataaaacgggacaacg

SEQ ID NO: 42162 - DNA, 33 bp, Homo sapiens
ggcaactcctccaaccacaggtttccacattat

SEQ ID NO: 42163 - DNA, 33 bp, Homo sapiens
ggaaccatatctaagaagtgctgcagaagctgt

SEQ ID NO: 42164 - DNA, 51 bp, Homo sapiens
cttaggcggttagggtgtgatcttacgaaaagaattggcaggccttctgag

SEQ ID NO: 42165 - DNA, 33 bp, Homo sapiens
ccttgggtttaaattacgcaagtcctgactagc

SEQ ID NO: 42166 - DNA, 51 bp, Homo sapiens
tatagattcattaaagggtcttaaaataggagctaggctgtgctgcaggct

SEQ ID NO: 42167 - DNA, 33 bp, Homo sapiens
tctgagaggttaaagagtagccagctcaaagat

SEQ ID NO: 42168 - DNA, 33 bp, Homo sapiens
gcccatatttctggtgcataatttctagagatc

SEQ ID NO: 42169 - DNA, 33 bp, Homo sapiens
tatgatttctggccccacgatggtcatagtcta

SEQ ID NO: 42170 - DNA, 33 bp, Homo sapiens
ccttatcatctcagtccgaaactccttaagctg

SEQ ID NO: 42171 - DNA, 33 bp, Homo sapiens
tttttgtactccctccaaagtatgcaacatact

SEQ ID NO: 42172 - DNA, 33 bp, Homo sapiens
tttggagaaatgtccactcaatcctttgcccat

SEQ ID NO: 42173 - DNA, 33 bp, Homo sapiens
gcacattatgaggaagcctggtgctttgggttg

SEQ ID NO: 42174 - DNA, 33 bp, Homo sapiens
atgcttacacttattccaatgtacatttaatta

SEQ ID NO: 42175 - DNA, 33 bp, Homo sapiens
ttgtctaagtttagcccgaggcccccctaacag

SEQ ID NO: 42176 - DNA, 33 bp, Homo sapiens
atcatttttttgtatacgttggaagcgctcgtg

SEQ ID NO: 42177 - DNA, 33 bp, Homo sapiens
aattactgtatgttaaagtaggagcttacgcct

SEQ ID NO: 42178 - DNA, 51 bp, Homo sapiens
aaaaaaataggttaatgggactcagcaattagtgaaacatacagaataata

SEQ ID NO: 42179 - DNA, 33 bp, Homo sapiens
agttggaagttgacccaacatgagctatggcac

SEQ ID NO: 42180 - DNA, 33 bp, Homo sapiens
ggcaccttccgcatgacgtttttatttgatgtt

SEQ ID NO: 42181 - DNA, 33 bp, Homo sapiens
gaacttaacaagcttccccaacaaaggaaaatg

SEQ ID NO: 42182 - DNA, 33 bp, Homo sapiens
ctagggtggtctgagacggctttaactataagg

SEQ ID NO: 42183 - DNA, 33 bp, Homo sapiens
ctcctcctgccagaaacgtttttaaggacctca

SEQ ID NO: 42184 - DNA, 33 bp, Homo sapiens
aatgttcaatgacagacagagtgtccgtttcag

SEQ ID NO: 42185 - DNA, 33 bp, Homo sapiens
tgtgctggagaactcacggaatctgcacttgga

SEQ ID NO: 42186 - DNA, 33 bp, Homo sapiens
gcttttggcagtgtcacagagtttaaaggacaa

SEQ ID NO: 42187 - DNA, 33 bp, Homo sapiens
ggtcatggcctcacaaactcttactgtcttggt

SEQ ID NO: 42188 - DNA, 33 bp, Homo sapiens
atcaacaaagctctcacgataaggatggtgttg

SEQ ID NO: 42189 - DNA, 33 bp, Homo sapiens
cttatgtttttcacagaccttttacaaatataa

SEQ ID NO: 42190 - DNA, 33 bp, Homo sapiens
atctatgtgtataaaccatggccacattttctg

SEQ ID NO: 42191 - DNA, 33 bp, Homo sapiens
aaactactttcaccatcatacttctgatttctc

SEQ ID NO: 42192 - DNA, 33 bp, Homo sapiens
atgctatccaaaggacccttcaaatgaaataga

SEQ ID NO: 42193 - DNA, 33 bp, Homo sapiens
ctgagaaattcacataaaaattggtcctggact

SEQ ID NO: 42194 - DNA, 33 bp, Homo sapiens
tgggctctgggagaaaatggctccatcagcaga

SEQ ID NO: 42195 - DNA, 33 bp, Homo sapiens
gaagaaactgaaccacacctacatctttgtcta

SEQ ID NO: 42196 - DNA, 33 bp, Homo sapiens
ttggaagtggtgtcctcaatggagaggcggatc

SEQ ID NO: 42197 - DNA, 33 bp, Homo sapiens
atcaaaaactccagaagaaattctcatgcagtt

SEQ ID NO: 42198 - DNA, 33 bp, Homo sapiens
ggaaacagtaaaattacatgggcatacatattt

SEQ ID NO: 42199 - DNA, 33 bp, Homo sapiens
aagttacataaataaactcagaggctttgtaaa

SEQ ID NO: 42200 - DNA, 33 bp, Homo sapiens
ggtactggtcggaaggcaaatttattgtattag

SEQ ID NO: 42201 - DNA, 33 bp, Homo sapiens
gtgttcctctatagcaggtcttgacgcctcttg

SEQ ID NO: 42202 - DNA, 33 bp, Homo sapiens
gagtcataacagaccacagcagagagtcttcct

SEQ ID NO: 42203 - DNA, 33 bp, Homo sapiens
cacagctagtaggaaaaatggaaataagctctc

SEQ ID NO: 42204 - DNA, 51 bp, Homo sapiens
atgaaccagcaaaagagactgtgaaagaacagctagagaaataggaagaaa

SEQ ID NO: 42205 - DNA, 33 bp, Homo sapiens
ttcaatccaaatcccaagtaactgtaaaataca

SEQ ID NO: 42206 - DNA, 51 bp, Homo sapiens
cgtgctgcagcagtgccagaataacaatctcattcaaggcatcacgacgtt

SEQ ID NO: 42207 - DNA, 33 bp, Homo sapiens
atttattgaaaccacaatgcaaacaattaaaaa

SEQ ID NO: 42208 - DNA, 33 bp, Homo sapiens
aatgtggctttcacatcagtttttaaaatttga

SEQ ID NO: 42209 - DNA, 33 bp, Homo sapiens
acgaccctggaggctacagaacagaataaatag

SEQ ID NO: 42210 - DNA, 33 bp, Homo sapiens
atctagcagccatttacctgttccaaacttact

SEQ ID NO: 42211 - DNA, 33 bp, Homo sapiens
gtaaatctgtggctcaaagagacttcggtattc

SEQ ID NO: 42212 - DNA, 33 bp, Homo sapiens
tagctccaatcaagtaacgaatgtctactgggt

SEQ ID NO: 42213 - DNA, 33 bp, Homo sapiens
acacgaacttgccccactccttatctagtgctg

SEQ ID NO: 42214 - DNA, 33 bp, Homo sapiens
gccactgctgtcaagggaaggatgaagcaacag

SEQ ID NO: 42215 - DNA, 33 bp, Homo sapiens
gatgtaaggaaggggcaaatcatatagtgagtc

SEQ ID NO: 42216 - DNA, 33 bp, Homo sapiens
agccaactgctggaaaaaattatcagggaaact

SEQ ID NO: 42217 - DNA, 33 bp, Homo sapiens
taatttctaaaagggcactgttgcacacttaag

SEQ ID NO: 42218 - DNA, 33 bp, Homo sapiens
agagaactggaatggaactgaattttgttgaga

SEQ ID NO: 42219 - DNA, 33 bp, Homo sapiens
tatgttaagaaagaaaactccattttagctgtt

SEQ ID NO: 42220 - DNA, 33 bp, Homo sapiens
gttaatgtctgcgagaatattatcagttcagat

SEQ ID NO: 42221 - DNA, 33 bp, Homo sapiens
tttctacagttgaccaccagatgaaatattaat

SEQ ID NO: 42222 - DNA, 33 bp, Homo sapiens
tgtcatccctgagtaagatgtgacttcacaatg

SEQ ID NO: 42223 - DNA, 33 bp, Homo sapiens
accacatgacacctgacggatagctttgccttg

SEQ ID NO: 42224 - DNA, 33 bp, Homo sapiens
atggttcactttttcaagcagtaggaattggaa

SEQ ID NO: 42225 - DNA, 33 bp, Homo sapiens
cccataagataccacaactcttcaactatcact

SEQ ID NO: 42226 - DNA, 33 bp, Homo sapiens
gctaaagtgtaagttacagttgcaggtgggatg

SEQ ID NO: 42227 - DNA, 33 bp, Homo sapiens
tgcccagccaggataacgaacttaaaaagaaaa

SEQ ID NO: 42228 - DNA, 33 bp, Homo sapiens
gctttatatcacagtacaaaaagctaaaaaatc

SEQ ID NO: 42229 - DNA, 33 bp, Homo sapiens
aaaaagttaatctagcgaatgctccaagttaca

SEQ ID NO: 42230 - DNA, 33 bp, Homo sapiens
aaacaaatcaatgcccaaaccaatctgaattgg

SEQ ID NO: 42231 - DNA, 33 bp, Homo sapiens
accttacctaagcagactctcttttggaagctc

SEQ ID NO: 42232 - DNA, 33 bp, Homo sapiens
ggctcatatacatttacgagaggcgtgtgtgtg

SEQ ID NO: 42233 - DNA, 33 bp, Homo sapiens
catccagcttccttcaatctatactaacctgtt

SEQ ID NO: 42234 - DNA, 33 bp, Homo sapiens
agctgcttaggatggcaaaacagaaacaagcac

SEQ ID NO: 42235 - DNA, 33 bp, Homo sapiens
agtaacaacaaggataaagagtctgaacttccc

SEQ ID NO: 42236 - DNA, 33 bp, Homo sapiens
tcaataggaagccgaaactgtagcagttgcctt

SEQ ID NO: 42237 - DNA, 33 bp, Homo sapiens
cgttctgtgggttgcacctgtaataagtcagac

SEQ ID NO: 42238 - DNA, 51 bp, Homo sapiens
cactaccccatcaaagcaacagtaacggagaatcagaaattttgccactga

SEQ ID NO: 42239 - DNA, 33 bp, Homo sapiens
ctgccctggaaattaccggggacttctggaagt

SEQ ID NO: 42240 - DNA, 33 bp, Homo sapiens
tcacatgatcttttaaatcactccccggcttct

SEQ ID NO: 42241 - DNA, 33 bp, Homo sapiens
ggggcagaacactgggaagccaggtatagagag

SEQ ID NO: 42242 - DNA, 33 bp, Homo sapiens
gcggcaatgtttcagcagagtctggcaagacgg

SEQ ID NO: 42243 - DNA, 51 bp, Homo sapiens
ctggactcaattctgattgacagaacgaaatggcaaaggtaagaggtagac

SEQ ID NO: 42244 - DNA, 33 bp, Homo sapiens
aagtgcaaatcattcaaccgagattcagggcct

SEQ ID NO: 42245 - DNA, 33 bp, Homo sapiens
ttgttttcctgtgttcacctgctgtctgcttgt

SEQ ID NO: 42246 - DNA, 33 bp, Homo sapiens
gaccggacagcgactccaccctgctacgcactc

SEQ ID NO: 42247 - DNA, 33 bp, Homo sapiens
aaaatgacttgtgaaaagaagtcaagccagtag

SEQ ID NO: 42248 - DNA, 33 bp, Homo sapiens
tacacacgaatgtgtacggaacacttttaattt

SEQ ID NO: 42249 - DNA, 33 bp, Homo sapiens
ttcggggcattggaaaagagaatcagggtactt

SEQ ID NO: 42250 - DNA, 33 bp, Homo sapiens
ttgctcaggatcttaggatcattacaagtcttc

SEQ ID NO: 42251 - DNA, 33 bp, Homo sapiens
taagtgtaggtaattaagaggcacagagcctgc

SEQ ID NO: 42252 - DNA, 33 bp, Homo sapiens
ctcctgcagctacagcgatttccttcgtctgtt

SEQ ID NO: 42253 - DNA, 51 bp, Homo sapiens
ctgcagaaagctcaaggggcaaacccaatgttagacagagaggggctcctt

SEQ ID NO: 42254 - DNA, 33 bp, Homo sapiens
agggtggagatgcaacaacattgactagtgatt

SEQ ID NO: 42255 - DNA, 33 bp, Homo sapiens
cttcctgaaacgtgtactaaaatgatcagaaaa

SEQ ID NO: 42256 - DNA, 33 bp, Homo sapiens
aatgaagagccacaacaaactgggcagagaaag

SEQ ID NO: 42257 - DNA, 33 bp, Homo sapiens
aaaaaaattcaatcccaagagcgattagatttg

SEQ ID NO: 42258 - DNA, 33 bp, Homo sapiens
agaataccctgcaaaacggtgatacagagcaga

SEQ ID NO: 42259 - DNA, 33 bp, Homo sapiens
gtctctcttactcccaatgctcttctagtacct

SEQ ID NO: 42260 - DNA, 33 bp, Homo sapiens
cacttactgtaaggaaaggaaacaaaattgaag

SEQ ID NO: 42261 - DNA, 33 bp, Homo sapiens
tcctacctattgcacaaaacaacggtaaaagga

SEQ ID NO: 42262 - DNA, 33 bp, Homo sapiens
ctagttcacattgacccaaatgccactggagta

SEQ ID NO: 42263 - DNA, 51 bp, Homo sapiens
aatctctgtcttatgttcactataaatgttttaagtcaacataatgctagc

SEQ ID NO: 42264 - DNA, 51 bp, Homo sapiens
ataaaccctagagattaggcaagtgaaaagaattatgaaataaaacaaagc

SEQ ID NO: 42265 - DNA, 51 bp, Homo sapiens
aaaatacaatctatagaacactataataaaagagatatgtaataactcaca

SEQ ID NO: 42266 - DNA, 51 bp, Homo sapiens
attttcctttgcttttggcagttacaatctatcagtgttatttgtaaaatg

SEQ ID NO: 42267 - DNA, 51 bp, Homo sapiens
gaaaaatacaacaaatttggccaaaacaccctgatcactgtggaggaaaca

SEQ ID NO: 42268 - DNA, 33 bp, Homo sapiens
attgtagtccctgccacccttactccaacacat

SEQ ID NO: 42269 - DNA, 33 bp, Homo sapiens
aagcacatagcccaaaatcaacagctattaaaa

SEQ ID NO: 42270 - DNA, 33 bp, Homo sapiens
aacagctactaagtgacgatgccaaggatttaa

SEQ ID NO: 42271 - DNA, 51 bp, Homo sapiens
tgtagcccttcaaataattttatgacgttttgccctatctgtagaatttgt

SEQ ID NO: 42272 - DNA, 51 bp, Homo sapiens
agtaaattgaattgaatacttgttaccaagattaagtagtatgatgatgtg

SEQ ID NO: 42273 - DNA, 33 bp, Homo sapiens
ttcaaggaactcagtcaataattacaagctaat

SEQ ID NO: 42274 - DNA, 33 bp, Homo sapiens
ctttcagagaaaacccagatacagggcatgaga

SEQ ID NO: 42275 - DNA, 33 bp, Homo sapiens
aataatgagttgcctactaagaaccaggggaat

SEQ ID NO: 42276 - DNA, 33 bp, Homo sapiens
atatcacatggttctacgatgacacacagattt

SEQ ID NO: 42277 - DNA, 33 bp, Homo sapiens
tacttccattgaaggacagctaagtggaaacta

SEQ ID NO: 42278 - DNA, 33 bp, Homo sapiens
tggttattagtgttcaatgaaagacacaagcaa

SEQ ID NO: 42279 - DNA, 33 bp, Homo sapiens
gaagggaacttagagaacatctacaatccacag

SEQ ID NO: 42280 - DNA, 33 bp, Homo sapiens
cctcataatttagaaaacaatcttactctgagt

SEQ ID NO: 42281 - DNA, 33 bp, Homo sapiens
cttcagagccatcataccaatttagttccagca

SEQ ID NO: 42282 - DNA, 33 bp, Homo sapiens
gatttttatagcagacacttagcccaagtaaga

SEQ ID NO: 42283 - DNA, 33 bp, Homo sapiens
ttaacgctgtcaccgaagtagaatagatattca

SEQ ID NO: 42284 - DNA, 33 bp, Homo sapiens
ttaaaaatagtatcccacccaaagtactgataa

SEQ ID NO: 42285 - DNA, 33 bp, Homo sapiens
gcgaagattacatgagaaagtctccaaaagcaa

SEQ ID NO: 42286 - DNA, 33 bp, Homo sapiens
gtcttgtctgtggcaactgttgtgagactgttc

SEQ ID NO: 42287 - DNA, 33 bp, Homo sapiens
atgctggtctcatttacgggctgcctaagaaat

SEQ ID NO: 42288 - DNA, 33 bp, Homo sapiens
tcacagagaaggaaagcacactcaatctgtcat

SEQ ID NO: 42289 - DNA, 33 bp, Homo sapiens
gaggacttcccagccacgaaaaactaagtcaat

SEQ ID NO: 42290 - DNA, 51 bp, Homo sapiens
cttaatatctttctaaaagcaataaactcatttgcaacagaacttggagaa

SEQ ID NO: 42291 - DNA, 33 bp, Homo sapiens
gaaaaatgccagaaagccaataatacatgcatg

SEQ ID NO: 42292 - DNA, 51 bp, Homo sapiens
ttttcagctgctgatttcaaattcacgtaataacacgagttacaggtaaat

SEQ ID NO: 42293 - DNA, 33 bp, Homo sapiens
agaagcagtgaggatacagaagctgcaaattga

SEQ ID NO: 42294 - DNA, 33 bp, Homo sapiens
caaattgaattaatgacagaaagtgtagcaaag

SEQ ID NO: 42295 - DNA, 33 bp, Homo sapiens
taaagatactttctagaattacacctgtgcttc

SEQ ID NO: 42296 - DNA, 51 bp, Homo sapiens
aatcaattaggataaactactacacgaaagaggctgatattttctcagcag

SEQ ID NO: 42297 - DNA, 33 bp, Homo sapiens
tttgaatttaaccaataagaagcactggtaggg

SEQ ID NO: 42298 - DNA, 33 bp, Homo sapiens
aaataagcactattgacacagagcaggttcttg

SEQ ID NO: 42299 - DNA, 33 bp, Homo sapiens
aggttcttatactaatcaaatgctgaacatata

SEQ ID NO: 42300 - DNA, 33 bp, Homo sapiens
tcttaactctgaagacgagctttgaattctgtc

SEQ ID NO: 42301 - DNA, 33 bp, Homo sapiens
tatattaagcaaatcgcagtacttcaaaacaaa

SEQ ID NO: 42302 - DNA, 33 bp, Homo sapiens
catccaaaaacctagaagagctggattaattac

SEQ ID NO: 42303 - DNA, 33 bp, Homo sapiens
aagaactaaatgtacaatgaaatttgggactaa

SEQ ID NO: 42304 - DNA, 33 bp, Homo sapiens
tatgtgagatctgtgaactatgtaatgcctttc

SEQ ID NO: 42305 - DNA, 33 bp, Homo sapiens
tacttcaaaattgctaagagaagattttaggtg

SEQ ID NO: 42306 - DNA, 33 bp, Homo sapiens
gctatgtagagaactaagaaaatgaatcaagta

SEQ ID NO: 42307 - DNA, 33 bp, Homo sapiens
aatctaatcaaagtcacactggatcggaaaagg

SEQ ID NO: 42308 - DNA, 33 bp, Homo sapiens
aaactgtccgctgaacaagggcggcttacatta

SEQ ID NO: 42309 - DNA, 33 bp, Homo sapiens
ttctttcattttcacagatttcactgcagaaac

SEQ ID NO: 42310 - DNA, 33 bp, Homo sapiens
gaaagacaatgaagcacgtaggtactcaggatc

SEQ ID NO: 42311 - DNA, 33 bp, Homo sapiens
agaagagggaagaggtcacaatggccgtggact

SEQ ID NO: 42312 - DNA, 33 bp, Homo sapiens
acaactagcaaaatgaaaggagttaagtcctta

SEQ ID NO: 42313 - DNA, 33 bp, Homo sapiens
tccgagccctacttacaattttgtcgtttactt

SEQ ID NO: 42314 - DNA, 33 bp, Homo sapiens
tttgctgcggacttaaaccttacaaggtaattg

SEQ ID NO: 42315 - DNA, 51 bp, Homo sapiens
agatcaagaagtacagtctatactacgaaattaaagttactagcacagtat

SEQ ID NO: 42316 - DNA, 51 bp, Homo sapiens
aagagacttgggtacattgaccacaaccatatatatatagtcacataatca

SEQ ID NO: 42317 - DNA, 51 bp, Homo sapiens
taattgcagcagttcaggctagagacggtgatattggtggaggtacaacgt

SEQ ID NO: 42318 - DNA, 51 bp, Homo sapiens
ccagtcagtgcaggtcattaaactcaagcaaaagttcactgaagcaaagac

SEQ ID NO: 42319 - DNA, 33 bp, Homo sapiens
gccagtgggtatcctacgagtaaatatccccag

SEQ ID NO: 42320 - DNA, 33 bp, Homo sapiens
tctgttataaaaaccaacagagtaatcaatatt

SEQ ID NO: 42321 - DNA, 33 bp, Homo sapiens
tgattctgttcctgaactggcattgatacagta

SEQ ID NO: 42322 - DNA, 33 bp, Homo sapiens
gggccatgtctatcaacaccaacaggttgtgct

SEQ ID NO: 42323 - DNA, 33 bp, Homo sapiens
acactcacacagatccgcaatcaattggcaaac

SEQ ID NO: 42324 - DNA, 51 bp, Homo sapiens
aaataaaaggcataataaaaatccaatgcaaagcacaaaagccaagaacag

SEQ ID NO: 42325 - DNA, 33 bp, Homo sapiens
aagactaggctgccaacagctaggaaagaagtg

SEQ ID NO: 42326 - DNA, 51 bp, Homo sapiens
ccagaagtaagccatatagccacccacaggtttgaggaattctagaaaata

SEQ ID NO: 42327 - DNA, 33 bp, Homo sapiens
gttctgcaaatttcacacttgccagcaattgag

SEQ ID NO: 42328 - DNA, 33 bp, Homo sapiens
tgtgtatctgtaatcccttgtatcacattgagc

SEQ ID NO: 42329 - DNA, 33 bp, Homo sapiens
atgatgttgcataacaaatgatttccaaaattt

SEQ ID NO: 42330 - DNA, 33 bp, Homo sapiens
ttaaccctaaatcagcaattacaatgtgaatat

SEQ ID NO: 42331 - DNA, 33 bp, Homo sapiens
agcattctaggcctgacggttataaaggtgtgt

SEQ ID NO: 42332 - DNA, 33 bp, Homo sapiens
tccagtggaaatccgacctgggcaatttatgac

SEQ ID NO: 42333 - DNA, 33 bp, Homo sapiens
taagtgcctctatttcgaatcaaattcttcccc

SEQ ID NO: 42334 - DNA, 33 bp, Homo sapiens
tgggacatttcctaacaccttaaacagctactc

SEQ ID NO: 42335 - DNA, 33 bp, Homo sapiens
gtgtgttataatctccactgtatttctgtctgc

SEQ ID NO: 42336 - DNA, 33 bp, Homo sapiens
acaatgctatgaaccacaaagctgaagttcaac

SEQ ID NO: 42337 - DNA, 33 bp, Homo sapiens
gcttaattgtaccccaaagatgcccacaaaatg

SEQ ID NO: 42338 - DNA, 33 bp, Homo sapiens
tctgttgctacacagaactacctgagaatgggt

SEQ ID NO: 42339 - DNA, 33 bp, Homo sapiens
ttgggaaccactcttacgaagcacagtgattat

SEQ ID NO: 42340 - DNA, 33 bp, Homo sapiens
cctatctccattaaacaaaacctaaccaaacac

SEQ ID NO: 42341 - DNA, 33 bp, Homo sapiens
aacataaccattcaacactaacttcttggtcct

SEQ ID NO: 42342 - DNA, 51 bp, Homo sapiens
ggagttcttctgaagatccatattacgaagaggtaaaaagtgaaattgtag

SEQ ID NO: 42343 - DNA, 33 bp, Homo sapiens
aaggaagccaggtagaagcctcaagtttccatg

SEQ ID NO: 42344 - DNA, 51 bp, Homo sapiens
ttctgtaaattacacatttcaaggaacttttatgcaagaatgcatcaagac

SEQ ID NO: 42345 - DNA, 33 bp, Homo sapiens
ccaagtttcctttcaccggcatcgaccctggaa

SEQ ID NO: 42346 - DNA, 33 bp, Homo sapiens
ccgccgtcactgttcacattctggaagtgttcg

SEQ ID NO: 42347 - DNA, 51 bp, Homo sapiens
ataaaccatccacgccgagaaacccactgaccgtacttatctgcatattaa

SEQ ID NO: 42348 - DNA, 33 bp, Homo sapiens
acatgatgaaacaaaacagcaagcgactcttga

SEQ ID NO: 42349 - DNA, 33 bp, Homo sapiens
aaacctagagctcagacctgaaaggccaggggt

SEQ ID NO: 42350 - DNA, 33 bp, Homo sapiens
ctttcagattagcaccaactttacttctgtatc

SEQ ID NO: 42351 - DNA, 33 bp, Homo sapiens
taaattagaatcgccaagtaaatctgttgatca

SEQ ID NO: 42352 - DNA, 33 bp, Homo sapiens
gtggaaaaaaatggagacagatatgggtggtag

SEQ ID NO: 42353 - DNA, 51 bp, Homo sapiens
aactggctgatctcttgtcctcaagatttcaaaagctaaaagaggtccatt

SEQ ID NO: 42354 - DNA, 33 bp, Homo sapiens
gggccatctgcctacaccagtgaggaaggatga

SEQ ID NO: 42355 - DNA, 33 bp, Homo sapiens
ctactggaattctagcccttggtcattcttctc

SEQ ID NO: 42356 - DNA, 33 bp, Homo sapiens
ttcttttgcactaggcgagcacattttaagcct

SEQ ID NO: 42357 - DNA, 33 bp, Homo sapiens
ccatcgaagagaggtaaagacttccctgtttgg

SEQ ID NO: 42358 - DNA, 33 bp, Homo sapiens
caaggaaaagaatttccctactggctcctgccc

SEQ ID NO: 42359 - DNA, 33 bp, Homo sapiens
ttctcagatgcaatccaccaaaaatacccagga

SEQ ID NO: 42360 - DNA, 33 bp, Homo sapiens
taccacaaaaattccacgatgaacccagtacca

SEQ ID NO: 42361 - DNA, 33 bp, Homo sapiens
acctagcgcgtcagtacgacagttttcccaaac

SEQ ID NO: 42362 - DNA, 33 bp, Homo sapiens
acttctgccctgcaaacgacaatgttaagagaa

SEQ ID NO: 42363 - DNA, 33 bp, Homo sapiens
tatgctaggcctgaccaattaaagctgagagca

SEQ ID NO: 42364 - DNA, 33 bp, Homo sapiens
attcagaggtgatagacgtttctaatcttagaa

SEQ ID NO: 42365 - DNA, 33 bp, Homo sapiens
tgatgtaacagaagtcaaaaaactttaatatca

SEQ ID NO: 42366 - DNA, 33 bp, Homo sapiens
ctctatgaattaaatccacacaacagatttctt

SEQ ID NO: 42367 - DNA, 33 bp, Homo sapiens
agaggtagacaaaaaccagttcttgacacttca

SEQ ID NO: 42368 - DNA, 33 bp, Homo sapiens
atgcttttctggtgtacggacagagcctttctt

SEQ ID NO: 42369 - DNA, 33 bp, Homo sapiens
ctagggtgatggtcaaaacacagacagtttgaa

SEQ ID NO: 42370 - DNA, 33 bp, Homo sapiens
taatttaatcagaatgccatgtttcctggctgg

SEQ ID NO: 42371 - DNA, 33 bp, Homo sapiens
ataatccaactgatacacattaaagctagaaat

SEQ ID NO: 42372 - DNA, 33 bp, Homo sapiens
ccaatcccgtgctagacaaaccctcctgcttgt

SEQ ID NO: 42373 - DNA, 33 bp, Homo sapiens
ccattgcctttgcacaatagttttaagttcttc

SEQ ID NO: 42374 - DNA, 33 bp, Homo sapiens
acctaaatgtccatcaataagggaccagggaaa

SEQ ID NO: 42375 - DNA, 33 bp, Homo sapiens
ctccttgctaggaaaactcccaaggaggcaact

SEQ ID NO: 42376 - DNA, 33 bp, Homo sapiens
gctgccaaagtacgagcccttgtcctgcgccag

SEQ ID NO: 42377 - DNA, 33 bp, Homo sapiens
tggactttattatagaacccttctgtatctata

SEQ ID NO: 42378 - DNA, 33 bp, Homo sapiens
ctccacctcattccccactttttacacagaaga

SEQ ID NO: 42379 - DNA, 33 bp, Homo sapiens
tacaggaggattctgcacttacctgtcacatat

SEQ ID NO: 42380 - DNA, 51 bp, Homo sapiens
tggcaagacttgaaacattggaaagaatttactccagaaagactctcagaa

SEQ ID NO: 42381 - DNA, 51 bp, Homo sapiens
actaatgccctggccagttacagccaatatgaacacacaggtccaagtaat

SEQ ID NO: 42382 - DNA, 33 bp, Homo sapiens
gtgatcccagcagctacggatgttaatgacaat

SEQ ID NO: 42383 - DNA, 33 bp, Homo sapiens
ttccatgggtaaatcaaggcaaagacaggccct

SEQ ID NO: 42384 - DNA, 33 bp, Homo sapiens
ttcctttctcatataaatctgtaaatgcaggca

SEQ ID NO: 42385 - DNA, 33 bp, Homo sapiens
tgccccagaaactttaacaaaggcttcaattca

SEQ ID NO: 42386 - DNA, 33 bp, Homo sapiens
tgctacaagtagaaaactccccatctgacctca

SEQ ID NO: 42387 - DNA, 33 bp, Homo sapiens
ataaagtaacttgccaccgctttattgaataaa

SEQ ID NO: 42388 - DNA, 33 bp, Homo sapiens
cattcatagaaaatcacgtagcgttaatcatat

SEQ ID NO: 42389 - DNA, 33 bp, Homo sapiens
tataaaggaaggcagcagagtatattgggaaga

SEQ ID NO: 42390 - DNA, 33 bp, Homo sapiens
tctatggattgctcagccaaaattcttggttct

SEQ ID NO: 42391 - DNA, 51 bp, Homo sapiens
ggcagcccctgggtgagcaatttctggcaggcatccagcccataaagtgtt

SEQ ID NO: 42392 - DNA, 33 bp, Homo sapiens
tactcttcctaacttccctgttttcatcctccc

SEQ ID NO: 42393 - DNA, 33 bp, Homo sapiens
gtggatggatggatgcaaatgtaacttagaaag

SEQ ID NO: 42394 - DNA, 33 bp, Homo sapiens
caaagtctccctaatacagacgcacccaatgca

SEQ ID NO: 42395 - DNA, 33 bp, Homo sapiens
agaacacctagaatttaaaaaaagcaatagata

SEQ ID NO: 42396 - DNA, 33 bp, Homo sapiens
ccccagggtgcacaccactacgtctgccataag

SEQ ID NO: 42397 - DNA, 33 bp, Homo sapiens
cccactctctgctgtaccagaaccaacccagga

SEQ ID NO: 42398 - DNA, 51 bp, Homo sapiens
ccaagaataggacttagtatttacactacagtccagggggctgacctctgc

SEQ ID NO: 42399 - DNA, 51 bp, Homo sapiens
ggtcaccacagtatgccatgacttacgatgctacaaaatcacattgctccc

SEQ ID NO: 42400 - DNA, 33 bp, Homo sapiens
ccttaaggtgcaataaaaacttaacttttgtga

SEQ ID NO: 42401 - DNA, 33 bp, Homo sapiens
aaatctattgtctacccatctggtttcttttat

SEQ ID NO: 42402 - DNA, 51 bp, Homo sapiens
accttcatgatccagcagtaaaggtcagcagctgagggggatctccccaga

SEQ ID NO: 42403 - DNA, 33 bp, Homo sapiens
tggggcaaggagtgcaaatagttgggagatggg

SEQ ID NO: 42404 - DNA, 33 bp, Homo sapiens
catcagcaatgtataacgaaggttccgtcctag

SEQ ID NO: 42405 - DNA, 33 bp, Homo sapiens
tttttggtaatcacaccgtgggatggggagaga

SEQ ID NO: 42406 - DNA, 33 bp, Homo sapiens
cgaagaggatcgtgtaactttttactaggaccc

SEQ ID NO: 42407 - DNA, 33 bp, Homo sapiens
aagaaagtcatgcacaatgaaaaacatgtgaaa

SEQ ID NO: 42408 - DNA, 33 bp, Homo sapiens
cccatatcaatctgccactggccacaggtcact

SEQ ID NO: 42409 - DNA, 33 bp, Homo sapiens
catgaggaagacagaaaggccagctagggaggg

SEQ ID NO: 42410 - DNA, 33 bp, Homo sapiens
tgctcttcctggcttgaagaactactgctggcc

SEQ ID NO: 42411 - DNA, 33 bp, Homo sapiens
agcggtcatgtaccgcaagagttgggaagaaca

SEQ ID NO: 42412 - DNA, 33 bp, Homo sapiens
tctctcattgttgcaaccttctttacaaatgca

SEQ ID NO: 42413 - DNA, 33 bp, Homo sapiens
caaaactagagcctaaccatggatgccgaggat

SEQ ID NO: 42414 - DNA, 33 bp, Homo sapiens
aacagaatgcaacaaaacatgttcaaccaaaca

SEQ ID NO: 42415 - DNA, 33 bp, Homo sapiens
aacataatggcatctcaagtcatattcttttgg

SEQ ID NO: 42416 - DNA, 33 bp, Homo sapiens
gattcaggcaagaggacatgtggagaacacata

SEQ ID NO: 42417 - DNA, 33 bp, Homo sapiens
agactcccggaagatacggcccagaccacttgc

SEQ ID NO: 42418 - DNA, 33 bp, Homo sapiens
agtgtgaacttacaccactgatatgtctagaaa

SEQ ID NO: 42419 - DNA, 33 bp, Homo sapiens
atcatcatggttagaaagaaaagcaatacacca

SEQ ID NO: 42420 - DNA, 33 bp, Homo sapiens
cttccaactgcaaggccgagactcataattcct

SEQ ID NO: 42421 - DNA, 33 bp, Homo sapiens
acctggacaatgaccaccgtttagtaaactgat

SEQ ID NO: 42422 - DNA, 33 bp, Homo sapiens
tcttgcctacagaaagacaggagatgcggcttt

SEQ ID NO: 42423 - DNA, 33 bp, Homo sapiens
agtctcttatgaaaaccggtaggagacagcgta

SEQ ID NO: 42424 - DNA, 33 bp, Homo sapiens
taggcagtaggcaaataataattgaggaaacca

SEQ ID NO: 42425 - DNA, 33 bp, Homo sapiens
taggtagcatggcaaggctgctttaaaacaaca

SEQ ID NO: 42426 - DNA, 33 bp, Homo sapiens
actaggctgtgttatacgacactcgagtctttt

SEQ ID NO: 42427 - DNA, 33 bp, Homo sapiens
gcatcttattctatcacactcacctattttgga

SEQ ID NO: 42428 - DNA, 33 bp, Homo sapiens
agatttgtgtctggaacccagatgagcctaaag

SEQ ID NO: 42429 - DNA, 33 bp, Homo sapiens
agggaaacttggaaaacgaggctaaccattctc

SEQ ID NO: 42430 - DNA, 33 bp, Homo sapiens
ctaataaagttgctaaaggagcttaggactaag

SEQ ID NO: 42431 - DNA, 33 bp, Homo sapiens
ccatctcttcaaattccctgtctaacctcattt

SEQ ID NO: 42432 - DNA, 33 bp, Homo sapiens
atttaaggtcctctctgacactgggattttggg

SEQ ID NO: 42433 - DNA, 33 bp, Homo sapiens
aatgtttctattccaccgtcagtattaacattg

SEQ ID NO: 42434 - DNA, 33 bp, Homo sapiens
agataactaattcttacgaggctattactaatg

SEQ ID NO: 42435 - DNA, 33 bp, Homo sapiens
tatggctactgaaggacggatttggttttgcca

SEQ ID NO: 42436 - DNA, 33 bp, Homo sapiens
attggaatattcctaacgtcagagagcttcata

SEQ ID NO: 42437 - DNA, 33 bp, Homo sapiens
ttctcttatattttcagggacccaaaccatgtc

SEQ ID NO: 42438 - DNA, 33 bp, Homo sapiens
taagaacaagatgctacgtaaaaggaacaatca

SEQ ID NO: 42439 - DNA, 33 bp, Homo sapiens
ttgtccagggcaaaaaaccttgaacttggagct

SEQ ID NO: 42440 - DNA, 33 bp, Homo sapiens
gatccagcagaagacacggcatgcgagatcttg

SEQ ID NO: 42441 - DNA, 33 bp, Homo sapiens
ccaggtaactcagttcccccatgaaagagcccc

SEQ ID NO: 42442 - DNA, 33 bp, Homo sapiens
cagggaacagtattcccaatgtgcactgagaag

SEQ ID NO: 42443 - DNA, 33 bp, Homo sapiens
ggtaggatatccaccccaaaatgccacagtggt

SEQ ID NO: 42444 - DNA, 33 bp, Homo sapiens
tcctgtgcttgcctccactctatcgggcgctgt

SEQ ID NO: 42445 - DNA, 51 bp, Homo sapiens
ttgatgttccaaagccaagataacaactctatcatttgataaagatcaagt

SEQ ID NO: 42446 - DNA, 33 bp, Homo sapiens
tcaaggaatcaaagcacggtgttacaaaatcaa

SEQ ID NO: 42447 - DNA, 33 bp, Homo sapiens
tcatagcaaaaggccaagttttaaagcatagtg

SEQ ID NO: 42448 - DNA, 33 bp, Homo sapiens
agcccctacatcacccccagtttcagaagcaaa

SEQ ID NO: 42449 - DNA, 33 bp, Homo sapiens
agaatcatagcaacaaaaagtagagaggtggtt

SEQ ID NO: 42450 - DNA, 33 bp, Homo sapiens
gtagttctcagtgtataagtcttctaactcctt

SEQ ID NO: 42451 - DNA, 33 bp, Homo sapiens
tggcatttatgtcaaaattatacactacactca

SEQ ID NO: 42452 - DNA, 33 bp, Homo sapiens
gcaaagcttatggaaaagaggcctgttgtttct

SEQ ID NO: 42453 - DNA, 33 bp, Homo sapiens
aagtccgagatcaagacgccaggcagttcagtt

SEQ ID NO: 42454 - DNA, 33 bp, Homo sapiens
tcagccttctctctcacaacagcctgggatggg

SEQ ID NO: 42455 - DNA, 33 bp, Homo sapiens
ggagggagctgggagactagaggtgcccaagtg

SEQ ID NO: 42456 - DNA, 33 bp, Homo sapiens
cttggaaacagtatccaattctaattcacgaag

SEQ ID NO: 42457 - DNA, 33 bp, Homo sapiens
ttatttgtgtaacgacaggctctatttcttgag

SEQ ID NO: 42458 - DNA, 33 bp, Homo sapiens
atttttccttggctatcactgtttcagtacata

SEQ ID NO: 42459 - DNA, 33 bp, Homo sapiens
agacccacggagctcacggtcgtcaggggtcct

SEQ ID NO: 42460 - DNA, 33 bp, Homo sapiens
gtgagcaggtaggcacaagtaagcctgaattca

SEQ ID NO: 42461 - DNA, 33 bp, Homo sapiens
ggtgcacagatgtcaacgattgaagtttcagaa

SEQ ID NO: 42462 - DNA, 33 bp, Homo sapiens
agtcaggttgtcccaaagtctgctcgagtctgg

SEQ ID NO: 42463 - DNA, 33 bp, Homo sapiens
ccatgttttctttaaacgccgctatcccatctt

SEQ ID NO: 42464 - DNA, 33 bp, Homo sapiens
gaagataaataaactacagctacatgaagcaac

SEQ ID NO: 42465 - DNA, 33 bp, Homo sapiens
aggttggagacatctgaaaaaggtagcaaatga

SEQ ID NO: 42466 - DNA, 33 bp, Homo sapiens
tgactttctgaatggaaccaatgtacatcctac

SEQ ID NO: 42467 - DNA, 33 bp, Homo sapiens
tgtgctcctaaccatcacattaggccacctctc

SEQ ID NO: 42468 - DNA, 33 bp, Homo sapiens
gcgttataaacactgcacagtaactgatactca

SEQ ID NO: 42469 - DNA, 33 bp, Homo sapiens
tccactcctgcttcacagccttttctgtccagc

SEQ ID NO: 42470 - DNA, 33 bp, Homo sapiens
tgtacccccacagagaacaacttcaaggactcc

SEQ ID NO: 42471 - DNA, 33 bp, Homo sapiens
aggctacaggtagtaagccttctagaagagcct

SEQ ID NO: 42472 - DNA, 33 bp, Homo sapiens
agtttcagtcaataacagcaacttaatattagg

SEQ ID NO: 42473 - DNA, 33 bp, Homo sapiens
cttgttcacacaggtcacaggaatatgctgggt

SEQ ID NO: 42474 - DNA, 33 bp, Homo sapiens
aaggtcacgttcatgcagatgatggaagacctc

SEQ ID NO: 42475 - DNA, 33 bp, Homo sapiens
tgagcccgtctctgaacacaaaccagacctcct

SEQ ID NO: 42476 - DNA, 33 bp, Homo sapiens
accttcgtgtcttaaccacatgaatcctggctt

SEQ ID NO: 42477 - DNA, 33 bp, Homo sapiens
atataatttttcttccacaaagaacagaaacac

SEQ ID NO: 42478 - DNA, 33 bp, Homo sapiens
ctctccctggaggtcaagtaggactgaaggttc

SEQ ID NO: 42479 - DNA, 33 bp, Homo sapiens
cgagccaccgtatccaacctacaaatattttaa

SEQ ID NO: 42480 - DNA, 33 bp, Homo sapiens
gatggcttctaagacacccaaataccaaatgct

SEQ ID NO: 42481 - DNA, 33 bp, Homo sapiens
aagtctcaaagcaaatgagttacttcctagata

SEQ ID NO: 42482 - DNA, 33 bp, Homo sapiens
caataacacaaaggaaacatcttgcagactctg

SEQ ID NO: 42483 - DNA, 33 bp, Homo sapiens
ctgcctttcccagcacaaggaaacatccacagc

SEQ ID NO: 42484 - DNA, 33 bp, Homo sapiens
ggcacaaaatcaataccccaatccaactgcatt

SEQ ID NO: 42485 - DNA, 33 bp, Homo sapiens
cagagctggccagacacatctgttggaggaaga

SEQ ID NO: 42486 - DNA, 33 bp, Homo sapiens
tccagaaaatgacatcacctgaggtataaccag

SEQ ID NO: 42487 - DNA, 33 bp, Homo sapiens
tgtacttatttgttgacaaacattgatactata

SEQ ID NO: 42488 - DNA, 33 bp, Homo sapiens
agtaattgtggactccagctctgacaatttgta

SEQ ID NO: 42489 - DNA, 33 bp, Homo sapiens
gaacctgtaaaaatcacgggaatacaagtgctg

SEQ ID NO: 42490 - DNA, 33 bp, Homo sapiens
agtgtagagtttcagacaccaggccattcactt

SEQ ID NO: 42491 - DNA, 33 bp, Homo sapiens
ctgaccttgactgcagcagggttttatgagtgg

SEQ ID NO: 42492 - DNA, 33 bp, Homo sapiens
ctcttcaccaatgatacgatcttatgcctagaa

SEQ ID NO: 42493 - DNA, 33 bp, Homo sapiens
cctagatttcaaaggacatgtggaaatgcctga

SEQ ID NO: 42494 - DNA, 33 bp, Homo sapiens
ggcttgtgcatgggaacggcacttcgtctccag

SEQ ID NO: 42495 - DNA, 33 bp, Homo sapiens
agcctttcagtgaaaaagaatgttttgggcaga

SEQ ID NO: 42496 - DNA, 33 bp, Homo sapiens
acacaaaaatgggaaaaatgtggagactgcctc

SEQ ID NO: 42497 - DNA, 33 bp, Homo sapiens
agtcatctcccttgaaatgctgtatccagggtg

SEQ ID NO: 42498 - DNA, 33 bp, Homo sapiens
cactctgaaaacactacgtactgcacaatccaa

SEQ ID NO: 42499 - DNA, 33 bp, Homo sapiens
tcactactaagcgaccaatactgacatgattgt

SEQ ID NO: 42500 - DNA, 33 bp, Homo sapiens
tgggtgtgcatagggacagaagggccaacctag

SEQ ID NO: 42501 - DNA, 33 bp, Homo sapiens
aaagcattagctttgcagagaaaaaatctggca

SEQ ID NO: 42502 - DNA, 33 bp, Homo sapiens
cctcccctatctgctgcacgtactgctccccac

SEQ ID NO: 42503 - DNA, 33 bp, Homo sapiens
gtttatggagcataaacgtgtcgaatgttacct

SEQ ID NO: 42504 - DNA, 33 bp, Homo sapiens
gtccgcgttttcacaacatcattttcaatctgc

SEQ ID NO: 42505 - DNA, 33 bp, Homo sapiens
attaagtgaaagaagcacaaatctgtctaacac

SEQ ID NO: 42506 - DNA, 33 bp, Homo sapiens
caagaatttggtctcaggatagctctgacccac

SEQ ID NO: 42507 - DNA, 33 bp, Homo sapiens
tggaaagtccaaataacgtccagaaaaatagtt

SEQ ID NO: 42508 - DNA, 33 bp, Homo sapiens
catcaaccagcggcaactgtgaatgtaaacaaa

SEQ ID NO: 42509 - DNA, 33 bp, Homo sapiens
gtatgaagcacatatacgagacagcaaaggttc

SEQ ID NO: 42510 - DNA, 33 bp, Homo sapiens
tgagcaggagatgtacagagaccacgtagcaag

SEQ ID NO: 42511 - DNA, 33 bp, Homo sapiens
atggggatgacagacccggaactgataacagga

SEQ ID NO: 42512 - DNA, 51 bp, Homo sapiens
tacccaccaaattatctttaaaaacactaatccttgaatgctcagggaggc

SEQ ID NO: 42513 - DNA, 33 bp, Homo sapiens
ttctgagttaggtagaacttcaatatggccaga

SEQ ID NO: 42514 - DNA, 33 bp, Homo sapiens
catgaagaagagtatacctgtaacaaaaacact

SEQ ID NO: 42515 - DNA, 33 bp, Homo sapiens
cttttaatggtttgaaattagagaacatacttc

SEQ ID NO: 42516 - DNA, 33 bp, Homo sapiens
gtaacattgtgaggtacatcaactttgtcttca

SEQ ID NO: 42517 - DNA, 33 bp, Homo sapiens
gaaaactggatcatgcaagcctcagacatagca

SEQ ID NO: 42518 - DNA, 33 bp, Homo sapiens
atggtatttgagtctgaactgaaagaatcaaca

SEQ ID NO: 42519 - DNA, 51 bp, Homo sapiens
gagtgtcgcagaggagtttaatttgcaaaagtgcagtatgcaaatttgagg

SEQ ID NO: 42520 - DNA, 33 bp, Homo sapiens
gctgtcaaatgacaaacgattactggcttttct

SEQ ID NO: 42521 - DNA, 33 bp, Homo sapiens
ttgaatttctttaggcccttcccgtatttcata

SEQ ID NO: 42522 - DNA, 33 bp, Homo sapiens
aaagcatcattaaaaacgtatgcagacattgta

SEQ ID NO: 42523 - DNA, 33 bp, Homo sapiens
acttaacaaacattgacctcctatgatgtacca

SEQ ID NO: 42524 - DNA, 33 bp, Homo sapiens
actaaattggtggtaactgtattttgacataac

SEQ ID NO: 42525 - DNA, 33 bp, Homo sapiens
tcaatcacacatcttaacgaagccaaagtctgt

SEQ ID NO: 42526 - DNA, 33 bp, Homo sapiens
caaatggtgtcacagaataagtgcaaagtaatg

SEQ ID NO: 42527 - DNA, 33 bp, Homo sapiens
acaacacagtcctgtcactgaatgcctggtttg

SEQ ID NO: 42528 - DNA, 33 bp, Homo sapiens
gtgtatataatttttacctcctcagctatgatc

SEQ ID NO: 42529 - DNA, 33 bp, Homo sapiens
ctgaagtctgagtggacacttgtagtcaagcca

SEQ ID NO: 42530 - DNA, 33 bp, Homo sapiens
ccagtgtcttgaactacgcatctcttccaacct

SEQ ID NO: 42531 - DNA, 33 bp, Homo sapiens
gtggcagacagaaaaaattaaaactaatgaatg

SEQ ID NO: 42532 - DNA, 33 bp, Homo sapiens
gcacggctctgaaggcaagagtgtgaaaccagg

SEQ ID NO: 42533 - DNA, 33 bp, Homo sapiens
ctgcaggggtctcatccgaacacttactccaag

SEQ ID NO: 42534 - DNA, 33 bp, Homo sapiens
acatttaaaagaatgacgggatgcctttgttta

SEQ ID NO: 42535 - DNA, 33 bp, Homo sapiens
actcatgctttcatccaagtgttcagtatcata

SEQ ID NO: 42536 - DNA, 33 bp, Homo sapiens
ctggttgatactccctaaatcacaggtcgcctt

SEQ ID NO: 42537 - DNA, 33 bp, Homo sapiens
gccatcctctattttgcacgctcagtcacccca

SEQ ID NO: 42538 - DNA, 33 bp, Homo sapiens
agcctctttcctcaaacagcaagagtctagact

SEQ ID NO: 42539 - DNA, 33 bp, Homo sapiens
actcctgccacctttgaagaaaattatcctgaa

SEQ ID NO: 42540 - DNA, 33 bp, Homo sapiens
ctcagggttcattagcaaatcaaaaatgcacag

SEQ ID NO: 42541 - DNA, 33 bp, Homo sapiens
cattaaaagttgctaaaatcacagagaacacca

SEQ ID NO: 42542 - DNA, 33 bp, Homo sapiens
cactgtcgaggtcataagaagtgaggaaagtct

SEQ ID NO: 42543 - DNA, 33 bp, Homo sapiens
tgacagccttgtccacacgctcttgtctccacc

SEQ ID NO: 42544 - DNA, 33 bp, Homo sapiens
agtagtagtaaaagcaaagcacctgtgtattat

SEQ ID NO: 42545 - DNA, 33 bp, Homo sapiens
tcagacagatgctggtaaacaggaaatgaacta

SEQ ID NO: 42546 - DNA, 33 bp, Homo sapiens
ctagaagatgtttcaacgatcggataactagca

SEQ ID NO: 42547 - DNA, 33 bp, Homo sapiens
ctgctccatttagttagagctggctttagcaag

SEQ ID NO: 42548 - DNA, 33 bp, Homo sapiens
gatggattggggtgaccatttttagaaaggacc

SEQ ID NO: 42549 - DNA, 33 bp, Homo sapiens
cacacagctaataaaaatcactgccaaaatcca

SEQ ID NO: 42550 - DNA, 33 bp, Homo sapiens
cttatgtgaatgctcaccaaaggataaacaatt

SEQ ID NO: 42551 - DNA, 33 bp, Homo sapiens
ttaaatagtgaattgccagaggaatactataaa

SEQ ID NO: 42552 - DNA, 51 bp, Homo sapiens
tggagctgacgcttcctcaatcatacggtgaaccgtcccagggtagctggg

SEQ ID NO: 42553 - DNA, 33 bp, Homo sapiens
ctttaagtatgcaaagccgctgcatcaagtcaa

SEQ ID NO: 42554 - DNA, 33 bp, Homo sapiens
tggctgagatgccgaccgcagcgatgagctcgc

SEQ ID NO: 42555 - DNA, 33 bp, Homo sapiens
atttgcatttcaggaacgtgcaggccggggaga

SEQ ID NO: 42556 - DNA, 33 bp, Homo sapiens
tttctgggacagccatgaaggacagtagtgaag

SEQ ID NO: 42557 - DNA, 33 bp, Homo sapiens
gccaccgtgcagggccaaaagtcttttattaat

SEQ ID NO: 42558 - DNA, 33 bp, Homo sapiens
ggaaatgaagaacctcagaaatgtgagtggcca

SEQ ID NO: 42559 - DNA, 33 bp, Homo sapiens
aggtaaccaggagacaccactgtaaattgaaat

SEQ ID NO: 42560 - DNA, 33 bp, Homo sapiens
tgtatgccactgagctaaatgttggggacaaat

SEQ ID NO: 42561 - DNA, 51 bp, Homo sapiens
agcctgggaagcctgaccacaaaccagcatctccaaggcatgaataattag

SEQ ID NO: 42562 - DNA, 33 bp, Homo sapiens
agcatatttgtatcatcacaaaagatttgcagc

SEQ ID NO: 42563 - DNA, 33 bp, Homo sapiens
ttctggggcactccgacaaggtgcatgggaagg

SEQ ID NO: 42564 - DNA, 33 bp, Homo sapiens
ttaacttgttagggcccattgtctacgtctgtc

SEQ ID NO: 42565 - DNA, 33 bp, Homo sapiens
aaagtggttgctactaaggaataacagcagctg

SEQ ID NO: 42566 - DNA, 33 bp, Homo sapiens
gatggatgaataggaacgcaaaaaggtggcttt

SEQ ID NO: 42567 - DNA, 33 bp, Homo sapiens
atgagtgttctggaaacatcatccaagcatgag

SEQ ID NO: 42568 - DNA, 33 bp, Homo sapiens
ggctctctcataaacacgtgcatgcagaaagac

SEQ ID NO: 42569 - DNA, 33 bp, Homo sapiens
catgggatctgaaatcacttttccaaatgcagc

SEQ ID NO: 42570 - DNA, 33 bp, Homo sapiens
tggctccggtatgaatgaactaatgtgcacata

SEQ ID NO: 42571 - DNA, 33 bp, Homo sapiens
gactgtgccttttgcaaattttcttctcaaacc

SEQ ID NO: 42572 - DNA, 33 bp, Homo sapiens
catgagtttgcatcaaatacccgtctctgaaaa

SEQ ID NO: 42573 - DNA, 33 bp, Homo sapiens
tgaactgagaaaaagacagtgctaacttctagg

SEQ ID NO: 42574 - DNA, 33 bp, Homo sapiens
gcctttgtttcagtcccaaccagagcagaagta

SEQ ID NO: 42575 - DNA, 33 bp, Homo sapiens
cataggcatgtttggccctacattttcactact

SEQ ID NO: 42576 - DNA, 33 bp, Homo sapiens
tattttaaagaaaagacagccagacaaggctgg

SEQ ID NO: 42577 - DNA, 33 bp, Homo sapiens
aattcctgcacacagaagaaaggatcagtgaaa

SEQ ID NO: 42578 - DNA, 51 bp, Homo sapiens
aactgcaggaagcacaatttagtcacaattagcaataaaaaaaataacact

SEQ ID NO: 42579 - DNA, 33 bp, Homo sapiens
atgagcctaggccagacatgatggctcatgcct

SEQ ID NO: 42580 - DNA, 33 bp, Homo sapiens
tcattgcttggtggtagagcgaatggtgtgggg

SEQ ID NO: 42581 - DNA, 33 bp, Homo sapiens
atttgcaatcataaagcatttggacatcagcta

SEQ ID NO: 42582 - DNA, 33 bp, Homo sapiens
ttgtctatgtttcacagtggaacagcaccatat

SEQ ID NO: 42583 - DNA, 33 bp, Homo sapiens
ttgattaaatggagtaagagccttctatctaat

SEQ ID NO: 42584 - DNA, 33 bp, Homo sapiens
ctaggtatatatccccccaaattgaaagcaagg

SEQ ID NO: 42585 - DNA, 33 bp, Homo sapiens
gaactcaaataatctccgacctgctaacagatg

SEQ ID NO: 42586 - DNA, 33 bp, Homo sapiens
gttttgtttagtgctacatcctcagtacatgga

SEQ ID NO: 42587 - DNA, 33 bp, Homo sapiens
aatttgcgtactcagaaatgatggaacaacttt

SEQ ID NO: 42588 - DNA, 33 bp, Homo sapiens
tcatcacagttggaaacgtttaagccaaatcat

SEQ ID NO: 42589 - DNA, 33 bp, Homo sapiens
gttaaaaagccaactaggggtactatgctcagg

SEQ ID NO: 42590 - DNA, 51 bp, Homo sapiens
atcactacaatcttacattgtcaatcaaacatcaccaaacctataatgcac

SEQ ID NO: 42591 - DNA, 33 bp, Homo sapiens
taagaaaatgagatttaaaaaacgtgagcagtt

SEQ ID NO: 42592 - DNA, 33 bp, Homo sapiens
ttgcagctgtgggaacaattgggccgagcagag

SEQ ID NO: 42593 - DNA, 51 bp, Homo sapiens
gcattagaaattaagcctcaaaggaatatacatataataagtgatcacaga

SEQ ID NO: 42594 - DNA, 33 bp, Homo sapiens
ttcatattttctgccagcattcattggttttaa

SEQ ID NO: 42595 - DNA, 33 bp, Homo sapiens
atagctcaagtatcaacagttcttaaagctaac

SEQ ID NO: 42596 - DNA, 51 bp, Homo sapiens
ccaatataaatttggtctcatcttcacattaatacatttggggttcaggtt

SEQ ID NO: 42597 - DNA, 33 bp, Homo sapiens
tgactagaagtccacacgagtatgcaagggaat

SEQ ID NO: 42598 - DNA, 33 bp, Homo sapiens
atgcactcttccttcaggccattttcctcacga

SEQ ID NO: 42599 - DNA, 33 bp, Homo sapiens
tgcagttccttaaaagcatcatgctcttcttgc

SEQ ID NO: 42600 - DNA, 33 bp, Homo sapiens
gttagaatcatcataaatctgtttcctctaagt

SEQ ID NO: 42601 - DNA, 33 bp, Homo sapiens
gatattgtatttagccaaaaatgcttgttctaa

SEQ ID NO: 42602 - DNA, 51 bp, Homo sapiens
actaaacctctgtgcctcaaacttacgtgtgaaataacagcactcacttat

SEQ ID NO: 42603 - DNA, 51 bp, Homo sapiens
gaaccctgtagacttacagactcaggaaacataatacttctttaaaaaaaa

SEQ ID NO: 42604 - DNA, 51 bp, Homo sapiens
ctactaaagtgcactgtttattcaccgagaaggcttttaaaggaaagctac

SEQ ID NO: 42605 - DNA, 51 bp, Homo sapiens
atactaaacttcttattaaagttacaataatttagagagtgtacatgcata

SEQ ID NO: 42606 - DNA, 33 bp, Homo sapiens
gttatgtggtgtatctaaagacccgtgttatat

SEQ ID NO: 42607 - DNA, 33 bp, Homo sapiens
ctgcagtataaaatcacggaatctgctgctgtt

SEQ ID NO: 42608 - DNA, 33 bp, Homo sapiens
tgcttagagtctacttaaagatcacagtgacag

SEQ ID NO: 42609 - DNA, 33 bp, Homo sapiens
ctctgaatgatacacaactgagaaaagttctgt

SEQ ID NO: 42610 - DNA, 33 bp, Homo sapiens
ctccatttccacattacctttgtcactctaagt

SEQ ID NO: 42611 - DNA, 33 bp, Homo sapiens
cagtatctacagttcccatactccaataaaccc

SEQ ID NO: 42612 - DNA, 33 bp, Homo sapiens
gaagctagataatagaaccatggtgattcataa

SEQ ID NO: 42613 - DNA, 33 bp, Homo sapiens
agaaagacaccagggaagtacgggcagaggaaa

SEQ ID NO: 42614 - DNA, 33 bp, Homo sapiens
atgttaagcttccaagaaaacaaaaatcttgta

SEQ ID NO: 42615 - DNA, 33 bp, Homo sapiens
gcagtgggagaaaacaaagaggaattggtaact

SEQ ID NO: 42616 - DNA, 33 bp, Homo sapiens
tcaggatctaactcaaatctggcttctatgact

SEQ ID NO: 42617 - DNA, 33 bp, Homo sapiens
aagcacagagactgcacggtacaaaggagcaag

SEQ ID NO: 42618 - DNA, 33 bp, Homo sapiens
ctcctaccacttcaggaatgttacttgtagttg

SEQ ID NO: 42619 - DNA, 33 bp, Homo sapiens
caaaaatagattgaaaggtagaggcttttaaat

SEQ ID NO: 42620 - DNA, 33 bp, Homo sapiens
gatgactaagtggctaaaatgtcactcagagtc

SEQ ID NO: 42621 - DNA, 33 bp, Homo sapiens
atcctgttggaaaacaatccttccttcagtttg

SEQ ID NO: 42622 - DNA, 33 bp, Homo sapiens
atcactgagtcagaaactggtgcttgaagactc

SEQ ID NO: 42623 - DNA, 33 bp, Homo sapiens
aggaagtgtagtagagccaaagtcgaagttggt

SEQ ID NO: 42624 - DNA, 33 bp, Homo sapiens
tggggttgtgctagcaccgggcagtgagcagag

SEQ ID NO: 42625 - DNA, 33 bp, Homo sapiens
acccatagatgtagaaatgttgaacgtacaaca

SEQ ID NO: 42626 - DNA, 33 bp, Homo sapiens
caattctgcttttcctcagatgcaaacatttta

SEQ ID NO: 42627 - DNA, 33 bp, Homo sapiens
aactgatatgctaagaatatgagtactaatgtt

SEQ ID NO: 42628 - DNA, 33 bp, Homo sapiens
aatcacagaaatgctcaccttatatataaaact

SEQ ID NO: 42629 - DNA, 51 bp, Homo sapiens
gatagtagaagtcccatggagaagaatatcaaatgatgagactgaaaggtt

SEQ ID NO: 42630 - DNA, 33 bp, Homo sapiens
gcctcatttataaaacactggtacggccaaact

SEQ ID NO: 42631 - DNA, 33 bp, Homo sapiens
tccactttcctaattcaagcacttctaggtacg

SEQ ID NO: 42632 - DNA, 51 bp, Homo sapiens
tcagaacccatactctgcgggccttaaaatggaaaatctctcctctagaca

SEQ ID NO: 42633 - DNA, 33 bp, Homo sapiens
aaaaggactatacgccaaaagagctgcaagaac

SEQ ID NO: 42634 - DNA, 33 bp, Homo sapiens
ccaagtgacttctacaccagggaattgtattga

SEQ ID NO: 42635 - DNA, 33 bp, Homo sapiens
gtggagaggttgcttacctgcaagtgcgtccaa

SEQ ID NO: 42636 - DNA, 51 bp, Homo sapiens
atgcatattgctggaggaagtaataacaatgatgcaaatttgcctggaaac

SEQ ID NO: 42637 - DNA, 33 bp, Homo sapiens
tctggccttttcactaaaatacaacaaagatta

SEQ ID NO: 42638 - DNA, 33 bp, Homo sapiens
tctaaatgcttgatacaggagcagaaattattt

SEQ ID NO: 42639 - DNA, 33 bp, Homo sapiens
gtttgaataaacatagacccaatttcaaacctt

SEQ ID NO: 42640 - DNA, 33 bp, Homo sapiens
gctgcctctcctcttcacgttttccccacagcg

SEQ ID NO: 42641 - DNA, 33 bp, Homo sapiens
agttgctgagggctacaaggcagatactacagg

SEQ ID NO: 42642 - DNA, 33 bp, Homo sapiens
tacaggacttgggacacactggatatggaagga

SEQ ID NO: 42643 - DNA, 33 bp, Homo sapiens
ccctcgacactggagccaaatgtcaattgagaa

SEQ ID NO: 42644 - DNA, 33 bp, Homo sapiens
atggagtgggtatgaaaagataaagaactgaag

SEQ ID NO: 42645 - DNA, 33 bp, Homo sapiens
tagaagaccacagtcaaatattggtgagtgcca

SEQ ID NO: 42646 - DNA, 33 bp, Homo sapiens
cacatcctggatgttgaataatgtgataaggag

SEQ ID NO: 42647 - DNA, 33 bp, Homo sapiens
gtctctgaaaatgccacgctcacagttccctaa

SEQ ID NO: 42648 - DNA, 33 bp, Homo sapiens
tgcccattattttgggaacaaattggaaaatac

SEQ ID NO: 42649 - DNA, 33 bp, Homo sapiens
aaaatacaagtgttgccaagtgcaaaaaacaga

SEQ ID NO: 42650 - DNA, 33 bp, Homo sapiens
acctgagcttcaaaccagcaagttttttattaa

SEQ ID NO: 42651 - DNA, 33 bp, Homo sapiens
tgtagaacaatactgccgatttatcacaccaga

SEQ ID NO: 42652 - DNA, 51 bp, Homo sapiens
gtatcagaattttagaacaaaaactccaaaagtgaaatggagaagcaagaa

SEQ ID NO: 42653 - DNA, 51 bp, Homo sapiens
tgccagggccccccatggtcatgcaatatgagactttcccttagatccctc

SEQ ID NO: 42654 - DNA, 33 bp, Homo sapiens
tactgctgggttttaaatcttgcctctgccctt

SEQ ID NO: 42655 - DNA, 51 bp, Homo sapiens
gaaccatgccaccggggatatcttacgtgctgaacatggggggaaactctt

SEQ ID NO: 42656 - DNA, 33 bp, Homo sapiens
aaaaccaatggagttacgctatacttatttcta

SEQ ID NO: 42657 - DNA, 51 bp, Homo sapiens
tgctgttgtacagcttgtaagagcaaggctaacaagagggccagtcttatt

SEQ ID NO: 42658 - DNA, 33 bp, Homo sapiens
actggtaactggtaaacgggaacttgagggaac

SEQ ID NO: 42659 - DNA, 33 bp, Homo sapiens
atatggtaagtgctataagtcccccaaggcact

SEQ ID NO: 42660 - DNA, 33 bp, Homo sapiens
ggatgactgacaatacagacactccactttatt

SEQ ID NO: 42661 - DNA, 33 bp, Homo sapiens
gcctcctagaagaaaccgaaactctagggcact

SEQ ID NO: 42662 - DNA, 33 bp, Homo sapiens
ttttcacaattcttgaacgagacaagaactatg

SEQ ID NO: 42663 - DNA, 33 bp, Homo sapiens
tgaccttgaccaatcaaagaaagcagccctcaa

SEQ ID NO: 42664 - DNA, 33 bp, Homo sapiens
ctggatacccgttaaccagccagggtctggctc

SEQ ID NO: 42665 - DNA, 33 bp, Homo sapiens
cccaaccctacagcaaatgtggtggttccgaag

SEQ ID NO: 42666 - DNA, 33 bp, Homo sapiens
aaatgatagataatgaacaagctacaactaagt

SEQ ID NO: 42667 - DNA, 33 bp, Homo sapiens
atgaccttcttactaactgaaattctgactacc

SEQ ID NO: 42668 - DNA, 33 bp, Homo sapiens
acgcaaaaacagctaacggccaggtgctgcatt

SEQ ID NO: 42669 - DNA, 33 bp, Homo sapiens
ctatgaagaccgtctacacacactgaaggaact

SEQ ID NO: 42670 - DNA, 51 bp, Homo sapiens
tagataaattattggcaagactaacaagaaataatatgcaaattaacaaaa

SEQ ID NO: 42671 - DNA, 33 bp, Homo sapiens
tgaaaattgccgtgacactttcttgcttcatgt

SEQ ID NO: 42672 - DNA, 33 bp, Homo sapiens
tcaccttcctctcatcagaaaagagataacaag

SEQ ID NO: 42673 - DNA, 33 bp, Homo sapiens
ctaggcactttcaacactattcatttaaacctg

SEQ ID NO: 42674 - DNA, 33 bp, Homo sapiens
tccttagagtgaagcaactttttctctgaatgt

SEQ ID NO: 42675 - DNA, 33 bp, Homo sapiens
catgtatttctcccaagaagctcaaagaacttc

SEQ ID NO: 42676 - DNA, 33 bp, Homo sapiens
ctttcctcatgcagccaatcatccaagttcttt

SEQ ID NO: 42677 - DNA, 33 bp, Homo sapiens
ctattgccaccgatacaaactggcttcagtgta

SEQ ID NO: 42678 - DNA, 33 bp, Homo sapiens
gcagatgagtagtcgacagcaattatattagaa

SEQ ID NO: 42679 - DNA, 33 bp, Homo sapiens
gggataatcttgcttaaatacgtttcctaggca

SEQ ID NO: 42680 - DNA, 33 bp, Homo sapiens
aagcatccgtagctcaagggtacctgtagaaca

SEQ ID NO: 42681 - DNA, 33 bp, Homo sapiens
ctcattggtctgggtacgatcagtgaatataga

SEQ ID NO: 42682 - DNA, 51 bp, Homo sapiens
cagcaaaaaagagcagctgcacttcaatttctgatgtcttttctccaggct

SEQ ID NO: 42683 - DNA, 33 bp, Homo sapiens
attgacgcgctgagagacaacataacatcagtt

SEQ ID NO: 42684 - DNA, 33 bp, Homo sapiens
gcctggtcaaagcagacggttttattgagatgt

SEQ ID NO: 42685 - DNA, 33 bp, Homo sapiens
tacaaaggtattgatacagaaacaagcaaataa

SEQ ID NO: 42686 - DNA, 33 bp, Homo sapiens
ttccaaacctctctcaatctatccttggtattt

SEQ ID NO: 42687 - DNA, 33 bp, Homo sapiens
cctttgagtccctagaagcattgggtaaataag

SEQ ID NO: 42688 - DNA, 33 bp, Homo sapiens
agaaactttctctaatcatctcaaatggaaggt

SEQ ID NO: 42689 - DNA, 33 bp, Homo sapiens
tcttaccatctttttccagccacatagaaggtt

SEQ ID NO: 42690 - DNA, 51 bp, Homo sapiens
caatttctatgagtgatgagaaagcaaatacctttatttcacatagcattt

SEQ ID NO: 42691 - DNA, 33 bp, Homo sapiens
tgagggaatgatatgcacagaattcagaataga

SEQ ID NO: 42692 - DNA, 33 bp, Homo sapiens
tacagagaagtctatgcattgctgacagacata

SEQ ID NO: 42693 - DNA, 33 bp, Homo sapiens
tccatttgttcatctccgacacggacgaagcca

SEQ ID NO: 42694 - DNA, 51 bp, Homo sapiens
cagtgaggtaatgttagcagaaggacgttgcataaagtcaaggacacattt

SEQ ID NO: 42695 - DNA, 33 bp, Homo sapiens
caagaatgtctcagtcgcggtaatttcccggcc

SEQ ID NO: 42696 - DNA, 33 bp, Homo sapiens
catactagtttcttcccctcctttcatgactca

SEQ ID NO: 42697 - DNA, 51 bp, Homo sapiens
attcactaccacaataattcaagcccggaactaatagccatttttaaactc

SEQ ID NO: 42698 - DNA, 33 bp, Homo sapiens
gaaacctgcagtgaaaacgtaaggtgatggagc

SEQ ID NO: 42699 - DNA, 33 bp, Homo sapiens
gtgcatcatgaaagaaactcgtcgaagaaagga

SEQ ID NO: 42700 - DNA, 33 bp, Homo sapiens
cagtgctaagaggaataaacactcattgtgcag

SEQ ID NO: 42701 - DNA, 33 bp, Homo sapiens
ggtcttgctctgaatacgatcctgcaaggaggc

SEQ ID NO: 42702 - DNA, 33 bp, Homo sapiens
ctcggaactgccagggaacaaacaattgaagcc

SEQ ID NO: 42703 - DNA, 33 bp, Homo sapiens
ccattataaaactgaaaaatcataagttgaatc

SEQ ID NO: 42704 - DNA, 33 bp, Homo sapiens
aacctcagctttgacactgcattttaagaaaaa

SEQ ID NO: 42705 - DNA, 33 bp, Homo sapiens
cagaagcttttaaataacttacatgagctgaaa

SEQ ID NO: 42706 - DNA, 33 bp, Homo sapiens
aaatcctcagcttttacaacatttggaaataac

SEQ ID NO: 42707 - DNA, 33 bp, Homo sapiens
agttttctaagagataaggaatttaagttacaa

SEQ ID NO: 42708 - DNA, 33 bp, Homo sapiens
agggtatatgggcacactgctgtaactgctgtg

SEQ ID NO: 42709 - DNA, 33 bp, Homo sapiens
gaaaagagaaatgtagacataaggccacataat

SEQ ID NO: 42710 - DNA, 33 bp, Homo sapiens
taaaagtggatctatcccagaaaaaatctaggc

SEQ ID NO: 42711 - DNA, 33 bp, Homo sapiens
tttcaacaaatattggaagctatcatatgccag

SEQ ID NO: 42712 - DNA, 33 bp, Homo sapiens
atttttttaagagaacaaaatgcagcaaatgcc

SEQ ID NO: 42713 - DNA, 33 bp, Homo sapiens
caaaaaacaaggtatccctagatggcagtttag

SEQ ID NO: 42714 - DNA, 33 bp, Homo sapiens
tctcactcccaagtaaccactattctcatttcc

SEQ ID NO: 42715 - DNA, 33 bp, Homo sapiens
ttttacagctacagataaacttgtatgatttgg

SEQ ID NO: 42716 - DNA, 33 bp, Homo sapiens
gtgtcaccccaccagacgttgatgagatttgat

SEQ ID NO: 42717 - DNA, 33 bp, Homo sapiens
tgtatgtcctgaaaataaaaggagaatatgtcc

SEQ ID NO: 42718 - DNA, 51 bp, Homo sapiens
agcatgatctctgggagcagaagaccaagatgctaaatgctggccctccat

SEQ ID NO: 42719 - DNA, 33 bp, Homo sapiens
ggcaaaaaattgaatgaagattgacagaatcag

SEQ ID NO: 42720 - DNA, 51 bp, Homo sapiens
ggatacaaattcactatggtattacagagatcaatttattagctaccacgc

SEQ ID NO: 42721 - DNA, 33 bp, Homo sapiens
taagagaggagaacccaggaatgaaggtcttgt

SEQ ID NO: 42722 - DNA, 51 bp, Homo sapiens
ggcaactgaatagaataaaccactgcagtaccagaccaaagccaaacaaaa

SEQ ID NO: 42723 - DNA, 33 bp, Homo sapiens
cagtattcacttttaaatgttgtggctctgagt

SEQ ID NO: 42724 - DNA, 51 bp, Homo sapiens
atgctttatttcactgaacttaaaccacatattctgaaaatcacaatgcat

SEQ ID NO: 42725 - DNA, 51 bp, Homo sapiens
ttcagatctttgcccatagtgatctaactccaaaagagaaactaggggtta

SEQ ID NO: 42726 - DNA, 33 bp, Homo sapiens
gatcagatctcataaccggtacatcacaaagtg

SEQ ID NO: 42727 - DNA, 33 bp, Homo sapiens
ctgcctaatatgtgaaaatcctgcttatccctg

SEQ ID NO: 42728 - DNA, 33 bp, Homo sapiens
tgcattagtaaatcaaccagacaaatcatttac

SEQ ID NO: 42729 - DNA, 33 bp, Homo sapiens
atcatacactgtcttacgagatttcttctttgg

SEQ ID NO: 42730 - DNA, 33 bp, Homo sapiens
tccctctaatgtcaagacctattcacctgaacc

SEQ ID NO: 42731 - DNA, 33 bp, Homo sapiens
tgtccaggaggattgaaaacaatatggtatcca

SEQ ID NO: 42732 - DNA, 51 bp, Homo sapiens
tctcatatcctcctgaagcctgaaaacttttggttagcatccatgcctctc

SEQ ID NO: 42733 - DNA, 33 bp, Homo sapiens
ttttgctggatactctcaattttcctctccaga

SEQ ID NO: 42734 - DNA, 33 bp, Homo sapiens
ctttacaacaatagtacgaaaatgatgcttttt

SEQ ID NO: 42735 - DNA, 33 bp, Homo sapiens
tgatattggggcaaaaacagggaaatgcaccat

SEQ ID NO: 42736 - DNA, 33 bp, Homo sapiens
aaagtggggattgtggaaagcccaacttgtagc

SEQ ID NO: 42737 - DNA, 33 bp, Homo sapiens
ctaaatatcacacttaacttgagaaaagttctt

SEQ ID NO: 42738 - DNA, 33 bp, Homo sapiens
tccctactgacagccactctggtattcagactg

SEQ ID NO: 42739 - DNA, 33 bp, Homo sapiens
tttaggtgcaactagcagaaaaaaatacgcatt

SEQ ID NO: 42740 - DNA, 33 bp, Homo sapiens
tcaggaatcatttcaacgcctcttgtttcctaa

SEQ ID NO: 42741 - DNA, 33 bp, Homo sapiens
aacagctgaacaatgccagggagagtcaggtga

SEQ ID NO: 42742 - DNA, 33 bp, Homo sapiens
accccattgacagataagtttgtataatgccac

SEQ ID NO: 42743 - DNA, 51 bp, Homo sapiens
tcccctgaaatcctgttaaacctgggaaatggagagtaaggaggaattgga

SEQ ID NO: 42744 - DNA, 33 bp, Homo sapiens
acaataaagctccttacagtggtggagaagagc

SEQ ID NO: 42745 - DNA, 33 bp, Homo sapiens
tctttctctactgacacatcggctactctcaaa

SEQ ID NO: 42746 - DNA, 33 bp, Homo sapiens
ctgaagctaacaactaccaccttttctccactt

SEQ ID NO: 42747 - DNA, 33 bp, Homo sapiens
gtaaccatgatgaagacctaaatgccttaccag

SEQ ID NO: 42748 - DNA, 33 bp, Homo sapiens
gaaaaaaatcccagagcattcttggtcatagtt

SEQ ID NO: 42749 - DNA, 33 bp, Homo sapiens
ggcaggagaagagacccgagtaggcaattggta

SEQ ID NO: 42750 - DNA, 33 bp, Homo sapiens
attttgacccagactacctgagctttcatgttg

SEQ ID NO: 42751 - DNA, 33 bp, Homo sapiens
aacaagattgcagaggacattttagactatttg

SEQ ID NO: 42752 - DNA, 33 bp, Homo sapiens
aattagacaaccccaacccgacagagcatttca

SEQ ID NO: 42753 - DNA, 33 bp, Homo sapiens
caggagcacataacagaagcttaatatgaatct

SEQ ID NO: 42754 - DNA, 33 bp, Homo sapiens
ctgcatggttaatccaatcaaagcccaacctgc

SEQ ID NO: 42755 - DNA, 51 bp, Homo sapiens
tattttgccaaggttaaagacattaccgtgacacagcctcaggaggtcctg

SEQ ID NO: 42756 - DNA, 33 bp, Homo sapiens
ttagaataagtaccaactggagcatctagcatc

SEQ ID NO: 42757 - DNA, 33 bp, Homo sapiens
tttattgaatgagaaccataaatgaataagtga

SEQ ID NO: 42758 - DNA, 33 bp, Homo sapiens
ggaaaaggcagggttacagctgatgagtttgat

SEQ ID NO: 42759 - DNA, 33 bp, Homo sapiens
actgacattttagacaaaagagcagaaattcgg

SEQ ID NO: 42760 - DNA, 33 bp, Homo sapiens
catctagttcttcacacgccaaatgagcagctg

SEQ ID NO: 42761 - DNA, 33 bp, Homo sapiens
aagctgaagaaggataagaacactatacaatgt

SEQ ID NO: 42762 - DNA, 33 bp, Homo sapiens
gaactgatgagaatgaataggctttcccaaaat

SEQ ID NO: 42763 - DNA, 33 bp, Homo sapiens
atcaattgccttaaaacaatgaatgcctactaa

SEQ ID NO: 42764 - DNA, 33 bp, Homo sapiens
agaatagaaaatggcacgtataactccaagttt

SEQ ID NO: 42765 - DNA, 51 bp, Homo sapiens
tttgtggccttatgaatgtctttcaatctgaccagagctgcaactccttct

SEQ ID NO: 42766 - DNA, 51 bp, Homo sapiens
cacttacatgatatggaatcctcaacgaaagttcagcagagagaatttttg

SEQ ID NO: 42767 - DNA, 33 bp, Homo sapiens
gaaagatgacaggcacaatgtagggaagccaga

SEQ ID NO: 42768 - DNA, 33 bp, Homo sapiens
agcacagtcataggaaataaaaccatatcaagg

SEQ ID NO: 42769 - DNA, 33 bp, Homo sapiens
gtctggatctactccccaagaccgaccaggcag

SEQ ID NO: 42770 - DNA, 33 bp, Homo sapiens
ctgaaaaaaattgaccagatttcataaaattga

SEQ ID NO: 42771 - DNA, 33 bp, Homo sapiens
cagacttgtgtaggcccgataacccctttgttt

SEQ ID NO: 42772 - DNA, 33 bp, Homo sapiens
accaaagactaaaacccgctacaatgtggaaaa

SEQ ID NO: 42773 - DNA, 33 bp, Homo sapiens
cactctatcatgcttcaccaatcttgtccttta

SEQ ID NO: 42774 - DNA, 33 bp, Homo sapiens
gcagaacacaaaaatgaacagaaacgtacaggt

SEQ ID NO: 42775 - DNA, 33 bp, Homo sapiens
aaaaaacgtttcaacaacttctatcatcagctc

SEQ ID NO: 42776 - DNA, 33 bp, Homo sapiens
ctcacataaaactaagacaggctttgaggaagg

SEQ ID NO: 42777 - DNA, 33 bp, Homo sapiens
caggtttatcttcataagctggcaaggagattc

SEQ ID NO: 42778 - DNA, 33 bp, Homo sapiens
ctgcttgtttctaatacgcccatcaaccaaagc

SEQ ID NO: 42779 - DNA, 33 bp, Homo sapiens
gaatgtgtatagcttaccctcaaatctcaaaac

SEQ ID NO: 42780 - DNA, 33 bp, Homo sapiens
tttcacatgacaagaggaactcagccttaacac

SEQ ID NO: 42781 - DNA, 33 bp, Homo sapiens
cgcctcacctgttgccactagcatttgcacact

SEQ ID NO: 42782 - DNA, 33 bp, Homo sapiens
aaaggaaatctgaacaggaatttgagataccta

SEQ ID NO: 42783 - DNA, 33 bp, Homo sapiens
cttgcttggacagtcagaagcactgagttattc

SEQ ID NO: 42784 - DNA, 33 bp, Homo sapiens
agaatcctgttacctacgtttaaaatgatggat

SEQ ID NO: 42785 - DNA, 33 bp, Homo sapiens
ggcggaagaatcaagaaggtcaatggggctatg

SEQ ID NO: 42786 - DNA, 33 bp, Homo sapiens
cacaatccaggccagacgtgataatggcctaaa

SEQ ID NO: 42787 - DNA, 33 bp, Homo sapiens
ccttttttcattttccagatatttccaaatatt

SEQ ID NO: 42788 - DNA, 33 bp, Homo sapiens
tgtataaaattacacactgagaaaagaggacat

SEQ ID NO: 42789 - DNA, 33 bp, Homo sapiens
aagctataatgaacaacgctagagaaccagagg

SEQ ID NO: 42790 - DNA, 51 bp, Homo sapiens
caatggcttctcctttatgaatcttactttaatttctcccccagctgctca

SEQ ID NO: 42791 - DNA, 33 bp, Homo sapiens
taacggatgggaaaaaatggtttgtagatggag

SEQ ID NO: 42792 - DNA, 33 bp, Homo sapiens
tgcaaatgggcacgtaaccttcaacaagtgtcc

SEQ ID NO: 42793 - DNA, 33 bp, Homo sapiens
caatcacatcatacctaacattcaggccgcaca

SEQ ID NO: 42794 - DNA, 33 bp, Homo sapiens
gtgggctatggtacaacatcagttcatatttcg

SEQ ID NO: 42795 - DNA, 33 bp, Homo sapiens
tgtcaatgttatttaacccgaataagaacatta

SEQ ID NO: 42796 - DNA, 33 bp, Homo sapiens
aaagtacctgacatcaaacattgtctcacctgt

SEQ ID NO: 42797 - DNA, 33 bp, Homo sapiens
ggttggcgggtccatacaagtgtctgctgcctt

SEQ ID NO: 42798 - DNA, 33 bp, Homo sapiens
tacgggagaattggaacgaactctctttgctct

SEQ ID NO: 42799 - DNA, 33 bp, Homo sapiens
ggtgcaaagacacagacatatagacatggtgaa

SEQ ID NO: 42800 - DNA, 33 bp, Homo sapiens
ggatgaaacttgaagacgttaaatgaaataagc

SEQ ID NO: 42801 - DNA, 33 bp, Homo sapiens
gacttaagggaactcgccattggatgtagtgac

SEQ ID NO: 42802 - DNA, 33 bp, Homo sapiens
ttatgcagcacctacaataagtaacagacctta

SEQ ID NO: 42803 - DNA, 33 bp, Homo sapiens
tcagaaggagtagatgaaaccaccatgaacttt

SEQ ID NO: 42804 - DNA, 33 bp, Homo sapiens
cctttgcaaatcacaactgaatctcctaaatcc

SEQ ID NO: 42805 - DNA, 33 bp, Homo sapiens
gaggctagcttcaagacagctgctgcagtataa

SEQ ID NO: 42806 - DNA, 33 bp, Homo sapiens
ttatacacagacgcaaacctaccatcctgtagc

SEQ ID NO: 42807 - DNA, 33 bp, Homo sapiens
agctgctttccagtccacagaggatgctcccta

SEQ ID NO: 42808 - DNA, 33 bp, Homo sapiens
atgatccatggtgggacacatcctcaacaacac

SEQ ID NO: 42809 - DNA, 33 bp, Homo sapiens
agttcttgaccactgcagacaaggcagatgcag

SEQ ID NO: 42810 - DNA, 33 bp, Homo sapiens
catgaagtactatttgaaggagaataaatatcc

SEQ ID NO: 42811 - DNA, 33 bp, Homo sapiens
gccgcttcctctccaaaattcacataggcgaaa

SEQ ID NO: 42812 - DNA, 33 bp, Homo sapiens
acacctcatggttctccaaatggtgaccatctc

SEQ ID NO: 42813 - DNA, 33 bp, Homo sapiens
ttatggtatagacacacggtagaatactataca

SEQ ID NO: 42814 - DNA, 33 bp, Homo sapiens
ttagccgtgctgtggacgagacgtgaaaaaggt

SEQ ID NO: 42815 - DNA, 33 bp, Homo sapiens
attggcagagaatatacggagatccgggagaaa

SEQ ID NO: 42816 - DNA, 33 bp, Homo sapiens
gaatcagacagcaaaagaatgtgtggacaagat

SEQ ID NO: 42817 - DNA, 33 bp, Homo sapiens
tgtccaaaaggactcacggagaaagcgcctcct

SEQ ID NO: 42818 - DNA, 33 bp, Homo sapiens
ctgagcagctctgacacggattcactggtgtcc

SEQ ID NO: 42819 - DNA, 33 bp, Homo sapiens
gactgcacaaggtaatcagccctaaagaaaccc

SEQ ID NO: 42820 - DNA, 33 bp, Homo sapiens
tttcaatttactgatacgaacatttgttgaagg

SEQ ID NO: 42821 - DNA, 33 bp, Homo sapiens
gcacagcatttgttccgctttgtcatctgtctt

SEQ ID NO: 42822 - DNA, 33 bp, Homo sapiens
tttctatttcacacttaaagaaacaaaggctca

SEQ ID NO: 42823 - DNA, 33 bp, Homo sapiens
gactcctgaagaccaacagaaaacaaacgaaca

SEQ ID NO: 42824 - DNA, 33 bp, Homo sapiens
attttgagcagccagacaggtgaagtatacaat

SEQ ID NO: 42825 - DNA, 33 bp, Homo sapiens
gtctgctataagtctaataatagtcacgccttt

SEQ ID NO: 42826 - DNA, 33 bp, Homo sapiens
tttagcttaattcaaccaagtgtcttaaaatgg

SEQ ID NO: 42827 - DNA, 51 bp, Homo sapiens
tgagtccaagcagtacccttcctcaataattctcaaataggcctctgaagt

SEQ ID NO: 42828 - DNA, 33 bp, Homo sapiens
gaaaggtaaacagccccgatgtccagccatagg

SEQ ID NO: 42829 - DNA, 33 bp, Homo sapiens
acacagcacattgctgaacatcaataaatattt

SEQ ID NO: 42830 - DNA, 33 bp, Homo sapiens
taagatgtaaatagaaacatcgtgtgagacttc

SEQ ID NO: 42831 - DNA, 33 bp, Homo sapiens
tggaacacggaactctcagagtctgttagatga

SEQ ID NO: 42832 - DNA, 33 bp, Homo sapiens
cagggtgtgtggttcagtccattcagtgtgttc

SEQ ID NO: 42833 - DNA, 33 bp, Homo sapiens
gtagcagtggtgaaaacgcttgcatgggtgcgc

SEQ ID NO: 42834 - DNA, 33 bp, Homo sapiens
gccaataacagtagctaaaagaatgcttactgt

SEQ ID NO: 42835 - DNA, 33 bp, Homo sapiens
gttcccagttgtgtcacattctcaccacctacc

SEQ ID NO: 42836 - DNA, 33 bp, Homo sapiens
ttgctgagaaacaaaggcattttctgtctcttt

SEQ ID NO: 42837 - DNA, 33 bp, Homo sapiens
taatcttgccacatgaaatttaccaaaacagaa

SEQ ID NO: 42838 - DNA, 33 bp, Homo sapiens
ctaacaggccgcacaccggtatcagtccacggc

SEQ ID NO: 42839 - DNA, 33 bp, Homo sapiens
tgaggagcgctggtctcacctatgatcccaaag

SEQ ID NO: 42840 - DNA, 33 bp, Homo sapiens
tcccaggatgttccgacggctaagaccagagcg

SEQ ID NO: 42841 - DNA, 33 bp, Homo sapiens
ggtcccggaggctcccactgtccacatctgcat

SEQ ID NO: 42842 - DNA, 33 bp, Homo sapiens
acatttttctcactaacgctcagcagagaaaaa

SEQ ID NO: 42843 - DNA, 33 bp, Homo sapiens
tcatttgcagttgagaaaaatgtaaacaaatgt

SEQ ID NO: 42844 - DNA, 33 bp, Homo sapiens
gtatccctacccatcacatttaaggcctcgaat

SEQ ID NO: 42845 - DNA, 33 bp, Homo sapiens
tccacaaatacatggaaactctgaacgtcctct

SEQ ID NO: 42846 - DNA, 33 bp, Homo sapiens
ggttaattaatgaagccgccgtaacttttttgt

SEQ ID NO: 42847 - DNA, 51 bp, Homo sapiens
aaagaatgagagtgtggccctagaacatttgtcatgcagtgtgctcagagc

SEQ ID NO: 42848 - DNA, 51 bp, Homo sapiens
catgttggtatggcactctctatgtcacagcacagagacctctactttgcc

SEQ ID NO: 42849 - DNA, 33 bp, Homo sapiens
gatgctctttagctgacggaggtaaggtctccc

SEQ ID NO: 42850 - DNA, 33 bp, Homo sapiens
gcttttccaatttacaatgatcaggaacccacg

SEQ ID NO: 42851 - DNA, 33 bp, Homo sapiens
gatggagtgtggaaaagtctgaatgacagccaa

SEQ ID NO: 42852 - DNA, 33 bp, Homo sapiens
gaatctcagaattttgcaagtgcttcaggccgg

SEQ ID NO: 42853 - DNA, 33 bp, Homo sapiens
tagagaattgggagaaagaactgtttgggagcc

SEQ ID NO: 42854 - DNA, 51 bp, Homo sapiens
cctattcctaagcccccttccaccacgacatcttttgatcctaagcaagat

SEQ ID NO: 42855 - DNA, 33 bp, Homo sapiens
ttccagtcacacagcacagacctgacaccaaag

SEQ ID NO: 42856 - DNA, 33 bp, Homo sapiens
acttcatttcacaaggcattggccagaactatt

SEQ ID NO: 42857 - DNA, 33 bp, Homo sapiens
ctttgggttagtcatccaaatacctctgggtcc

SEQ ID NO: 42858 - DNA, 33 bp, Homo sapiens
cacattgcagacataacacaggaagggctgttc

SEQ ID NO: 42859 - DNA, 33 bp, Homo sapiens
gctgttctagaaagctaaagatccaattctaag

SEQ ID NO: 42860 - DNA, 33 bp, Homo sapiens
gtatgtgtgaaaataactagcaggcttggggga

SEQ ID NO: 42861 - DNA, 51 bp, Homo sapiens
taaaggcagaggccagcaccacttaaagaagagactgcaaaagggattcat

SEQ ID NO: 42862 - DNA, 51 bp, Homo sapiens
aaacaatgaataactttgtgcacttaacccatctgtagaaaaccatctgtg

SEQ ID NO: 42863 - DNA, 33 bp, Homo sapiens
tactgtatcttatcaactgtaagacacgtttca

SEQ ID NO: 42864 - DNA, 33 bp, Homo sapiens
gaatgagcacagtgaagatccaattagtgagtt

SEQ ID NO: 42865 - DNA, 33 bp, Homo sapiens
aagatgcacggcagcaaagcattatatagtatt

SEQ ID NO: 42866 - DNA, 33 bp, Homo sapiens
agcatagccaccttctaaagactgtagcaccag

SEQ ID NO: 42867 - DNA, 33 bp, Homo sapiens
atcaattccacattacagccagttaaagaacaa

SEQ ID NO: 42868 - DNA, 33 bp, Homo sapiens
tgggcagatcactcagaagttcgaaagtagcct

SEQ ID NO: 42869 - DNA, 33 bp, Homo sapiens
tcatttacacaactgaatactccacagctcata

SEQ ID NO: 42870 - DNA, 33 bp, Homo sapiens
tgatccacatttggtcacagatgtagatccccc

SEQ ID NO: 42871 - DNA, 33 bp, Homo sapiens
gctcaggagttaaagaccaggttggacaacaca

SEQ ID NO: 42872 - DNA, 33 bp, Homo sapiens
aaagtgtgtcaccttacagaaagagcaaggtct

SEQ ID NO: 42873 - DNA, 33 bp, Homo sapiens
accaacctatgaagacagtctccacagctcaag

SEQ ID NO: 42874 - DNA, 33 bp, Homo sapiens
aaaatgctaatccaaacaagggcaggttggaga

SEQ ID NO: 42875 - DNA, 33 bp, Homo sapiens
aatgtgacctccagcaatctttctccagcccag

SEQ ID NO: 42876 - DNA, 33 bp, Homo sapiens
ctaaataagaaaagtccaagttgagtctataaa

SEQ ID NO: 42877 - DNA, 33 bp, Homo sapiens
agaaatatctgtgtaacacaactgctaaattat

SEQ ID NO: 42878 - DNA, 33 bp, Homo sapiens
atccattcttaaggcacgaacacaaatagtgag

SEQ ID NO: 42879 - DNA, 33 bp, Homo sapiens
ttcaatcctggctctaccacttgcttctctaag

SEQ ID NO: 42880 - DNA, 33 bp, Homo sapiens
gggaatcatgatcttaacttgcagcgttgtgat

SEQ ID NO: 42881 - DNA, 33 bp, Homo sapiens
acatttacacaaagaaatgggtattgtgaaaga

SEQ ID NO: 42882 - DNA, 33 bp, Homo sapiens
gtaattctgccataacaaaactcacctgattgg

SEQ ID NO: 42883 - DNA, 51 bp, Homo sapiens
ccattgtacaacagtattctaggccaccaacaaaagtgtgacagacacact

SEQ ID NO: 42884 - DNA, 51 bp, Homo sapiens
catcctagggagaatttcaatcatacgtaagtgcagacagaattaggtact

SEQ ID NO: 42885 - DNA, 33 bp, Homo sapiens
ggattcactctgaagaacatggattaagtttga

SEQ ID NO: 42886 - DNA, 33 bp, Homo sapiens
gcctctaaggcaaagacgatgtttcctatctcc

SEQ ID NO: 42887 - DNA, 33 bp, Homo sapiens
taattagcgatcttaccgcattttgcaaatagg

SEQ ID NO: 42888 - DNA, 33 bp, Homo sapiens
tgttgtagcccttgtaacatctgctgtagtgat

SEQ ID NO: 42889 - DNA, 33 bp, Homo sapiens
acagtgcctggactagaagcagctaacatccca

SEQ ID NO: 42890 - DNA, 33 bp, Homo sapiens
tacattcacctttgcacatatcttctgctggtc

SEQ ID NO: 42891 - DNA, 33 bp, Homo sapiens
tatgttgatccaaagactcaggaattaaaaagt

SEQ ID NO: 42892 - DNA, 33 bp, Homo sapiens
cacccagcatgttgtacgtccacgtgtttttgt

SEQ ID NO: 42893 - DNA, 33 bp, Homo sapiens
cttgtgtagaaaaagcaaacagactgctcacaa

SEQ ID NO: 42894 - DNA, 33 bp, Homo sapiens
cctgaacccctttcaccgtctatttggatagaa

SEQ ID NO: 42895 - DNA, 33 bp, Homo sapiens
gttaattttattcagcaacagttttcataggta

SEQ ID NO: 42896 - DNA, 33 bp, Homo sapiens
cagtacaaaaaggagacagaaccccagtcaagc

SEQ ID NO: 42897 - DNA, 33 bp, Homo sapiens
tttctgccctaagagaccacagaatagctgtaa

SEQ ID NO: 42898 - DNA, 33 bp, Homo sapiens
ataactggtatttctccaggaactctctgtaac

SEQ ID NO: 42899 - DNA, 33 bp, Homo sapiens
aaaactgaggaaggaacaggagccacacatgtc

SEQ ID NO: 42900 - DNA, 33 bp, Homo sapiens
gactcacacagaaatcacttggagaggaagaac

SEQ ID NO: 42901 - DNA, 33 bp, Homo sapiens
agaatgtttgacatgacacaaagctgcccgaag

SEQ ID NO: 42902 - DNA, 33 bp, Homo sapiens
atgcaggctacttccactcaagctctagaagga

SEQ ID NO: 42903 - DNA, 33 bp, Homo sapiens
gtgagagttagaaatgaacaatggagttctgtg

SEQ ID NO: 42904 - DNA, 33 bp, Homo sapiens
tgagagactgtttgtgcaagaaggagcgagagg

SEQ ID NO: 42905 - DNA, 33 bp, Homo sapiens
ccctgttcactcttccacaaagaacccttcccc

SEQ ID NO: 42906 - DNA, 33 bp, Homo sapiens
tgggtgctgtgggtaaagtctgaggggacagtg

SEQ ID NO: 42907 - DNA, 33 bp, Homo sapiens
ccaatcgagagaaaaaatcatgcctgcccatgt

SEQ ID NO: 42908 - DNA, 33 bp, Homo sapiens
ggacccactgactttcaagtgtagatgtggatg

SEQ ID NO: 42909 - DNA, 33 bp, Homo sapiens
gtcacgtatcattgtgaaatactccattaagcc

SEQ ID NO: 42910 - DNA, 33 bp, Homo sapiens
gtggtaggagactgacaaagaaattgattagtc

SEQ ID NO: 42911 - DNA, 33 bp, Homo sapiens
gccaagtgcaatcttacaggaatgacccatgta

SEQ ID NO: 42912 - DNA, 51 bp, Homo sapiens
gaacaaagaggaaagatggccaagacgaccacttgaattcctatgaaatga

SEQ ID NO: 42913 - DNA, 33 bp, Homo sapiens
gcctcatttcctatacaaaacagtcactaaaca

SEQ ID NO: 42914 - DNA, 33 bp, Homo sapiens
tgtgtagtacagtgttcaaaagtttgttctcaa

SEQ ID NO: 42915 - DNA, 33 bp, Homo sapiens
atgtgattcatgtataacaaagaggatcaggaa

SEQ ID NO: 42916 - DNA, 33 bp, Homo sapiens
ctcactgtgtctggcactcaccccaattattac

SEQ ID NO: 42917 - DNA, 33 bp, Homo sapiens
gctcagaaaattaaagaagaaaattcagagctg

SEQ ID NO: 42918 - DNA, 33 bp, Homo sapiens
aagtattttatacttacggcatatcgtcactgg

SEQ ID NO: 42919 - DNA, 33 bp, Homo sapiens
aaacattgacgctttcaatatcatgttaatttc

SEQ ID NO: 42920 - DNA, 33 bp, Homo sapiens
tacacgcgacactctcacccttgcattcacacg

SEQ ID NO: 42921 - DNA, 33 bp, Homo sapiens
tgtgaggctgtacatacgtgagctcctccgtgt

SEQ ID NO: 42922 - DNA, 33 bp, Homo sapiens
aggctcagagagggaaagtaacctgcctagagt

SEQ ID NO: 42923 - DNA, 33 bp, Homo sapiens
tctacaggcatctcacaatttacgtgtccactg

SEQ ID NO: 42924 - DNA, 33 bp, Homo sapiens
ttggggcctacgcctaaattcgagggcctgaac

SEQ ID NO: 42925 - DNA, 33 bp, Homo sapiens
agacggcctcggctgcaatggcgcctggaaagt

SEQ ID NO: 42926 - DNA, 33 bp, Homo sapiens
aaggtggattaccacaatgctccccaagcacac

SEQ ID NO: 42927 - DNA, 33 bp, Homo sapiens
agaccagcccctatcaagctccctggcacacag

SEQ ID NO: 42928 - DNA, 51 bp, Homo sapiens
gctgactgaaacttagcccttcatggacttaaacttgtttccttttaaact

SEQ ID NO: 42929 - DNA, 33 bp, Homo sapiens
acccaacttggacctgaagagtcaaggtcaaag

SEQ ID NO: 42930 - DNA, 33 bp, Homo sapiens
gaatgagacctgaagccgctggacatcagggca

SEQ ID NO: 42931 - DNA, 33 bp, Homo sapiens
ctaggctctggcaaagaatcagaacataacact

SEQ ID NO: 42932 - DNA, 33 bp, Homo sapiens
aggccagatctaaaaacgtactgtcaagaaaca

SEQ ID NO: 42933 - DNA, 33 bp, Homo sapiens
atctggtatataggagcctacaatggctatcac

SEQ ID NO: 42934 - DNA, 33 bp, Homo sapiens
gtcctctccctggtaccatctgttagtccactc

SEQ ID NO: 42935 - DNA, 33 bp, Homo sapiens
gagctaattaaaccaacgtggacccaagtgcct

SEQ ID NO: 42936 - DNA, 33 bp, Homo sapiens
ggactgctttccacacacttgtaatttcatccc

SEQ ID NO: 42937 - DNA, 33 bp, Homo sapiens
ttatactcactactcacattcattttacaccaa

SEQ ID NO: 42938 - DNA, 33 bp, Homo sapiens
ctttgaaatgcaaaccccatcatgacatgcctt

SEQ ID NO: 42939 - DNA, 33 bp, Homo sapiens
ttctacttgttgataaagcatggaactgaatgg

SEQ ID NO: 42940 - DNA, 33 bp, Homo sapiens
ccatacacagcaagcacggggatgtggaggaag

SEQ ID NO: 42941 - DNA, 33 bp, Homo sapiens
cttagaatgtgtaaacggcagctgctcaggaaa

SEQ ID NO: 42942 - DNA, 33 bp, Homo sapiens
tggttatctttgggaaacagaactatgcttgat

SEQ ID NO: 42943 - DNA, 33 bp, Homo sapiens
ggttctcaatttttctgaaatggatgtgtatac

SEQ ID NO: 42944 - DNA, 33 bp, Homo sapiens
cctgagagttgagtgaaaatgaataaaaattag

SEQ ID NO: 42945 - DNA, 51 bp, Homo sapiens
gataggtctagcagtagagatcaaccaaggtgatgcacccaggagacatct

SEQ ID NO: 42946 - DNA, 33 bp, Homo sapiens
agaaagggatgtatgcaaaccagtttagaggca

SEQ ID NO: 42947 - DNA, 33 bp, Homo sapiens
ttggaactggcaattcaacagcttttatttgct

SEQ ID NO: 42948 - DNA, 33 bp, Homo sapiens
gttaggtgaaaaacaaaaggtgcataccataat

SEQ ID NO: 42949 - DNA, 33 bp, Homo sapiens
aaaaacaactcagggacgtatgttaggatgttg

SEQ ID NO: 42950 - DNA, 33 bp, Homo sapiens
gaccaagacaaaaacaagactactccataatta

SEQ ID NO: 42951 - DNA, 33 bp, Homo sapiens
cctgctacctccttaccgctccagaggaccttt

SEQ ID NO: 42952 - DNA, 33 bp, Homo sapiens
aactcacctacatcacacaaccagtaagtttca

SEQ ID NO: 42953 - DNA, 33 bp, Homo sapiens
tgcttccttcacctagaaacatacctgtgtcct

SEQ ID NO: 42954 - DNA, 33 bp, Homo sapiens
tgaggtctcataaaaaaagtgtgtatcataagg

SEQ ID NO: 42955 - DNA, 33 bp, Homo sapiens
accagagtcatctttcaaaaatacagatcagaa

SEQ ID NO: 42956 - DNA, 33 bp, Homo sapiens
atggtaagaacaaaacagtatgtgagagacagc

SEQ ID NO: 42957 - DNA, 33 bp, Homo sapiens
gatacctggacatggacgggctaaaaggaatca

SEQ ID NO: 42958 - DNA, 33 bp, Homo sapiens
cttattccttaatctggaccaagtaacacggtg

SEQ ID NO: 42959 - DNA, 51 bp, Homo sapiens
aacaactgaccaaggactctggctgcctttgaaatatattatcatgtttga

SEQ ID NO: 42960 - DNA, 51 bp, Homo sapiens
cttgaatttattctcttatagttccaaaggccagaaatctgaaatcagttt

SEQ ID NO: 42961 - DNA, 33 bp, Homo sapiens
tttgttcttatgactccatgattctgtgtcaag

SEQ ID NO: 42962 - DNA, 33 bp, Homo sapiens
acagagccaactataccatcccaatttgcataa

SEQ ID NO: 42963 - DNA, 51 bp, Homo sapiens
attcaaggtgagagaggcctttggaacatactaatgaaactttgattttta

SEQ ID NO: 42964 - DNA, 33 bp, Homo sapiens
aacaataccgtgaatgcaaaaacctcttccaaa

SEQ ID NO: 42965 - DNA, 33 bp, Homo sapiens
ggtagaaacagaccacgaatgattccacaatta

SEQ ID NO: 42966 - DNA, 33 bp, Homo sapiens
tccttactgctaaatccaaaacacgtttttcct

SEQ ID NO: 42967 - DNA, 33 bp, Homo sapiens
actttgccaatcatcactctccatctcatcagc

SEQ ID NO: 42968 - DNA, 33 bp, Homo sapiens
aactcctgaacacagaacttagaacacagcagg

SEQ ID NO: 42969 - DNA, 51 bp, Homo sapiens
aaatgatgagcatgagccagatttaagaggaatgctgactctttttttaaa

SEQ ID NO: 42970 - DNA, 51 bp, Homo sapiens
agcagttctcacttattactaggacaaaggaacagtaagtcttttcctttc

SEQ ID NO: 42971 - DNA, 33 bp, Homo sapiens
acaatactgcgttgtacacttaaaaattaacca

SEQ ID NO: 42972 - DNA, 33 bp, Homo sapiens
agtattgttaatcataggctctatactgtacgg

SEQ ID NO: 42973 - DNA, 33 bp, Homo sapiens
aatgctttctgataacagcgttcagtgaaaaga

SEQ ID NO: 42974 - DNA, 33 bp, Homo sapiens
atggtagaacttcttccgaaattggagtcaatc

SEQ ID NO: 42975 - DNA, 33 bp, Homo sapiens
tggggtttcccttgaccgtatgatgactgacac

SEQ ID NO: 42976 - DNA, 33 bp, Homo sapiens
attggcaacatttgacaggtatcagatggttat

SEQ ID NO: 42977 - DNA, 33 bp, Homo sapiens
aaaggttgttcctaaaataagggcagagtcaca

SEQ ID NO: 42978 - DNA, 33 bp, Homo sapiens
caaggtaagcaagccacgttgatagctctaagg

SEQ ID NO: 42979 - DNA, 33 bp, Homo sapiens
tcagtgtttatttccaatctaacggagagctca

SEQ ID NO: 42980 - DNA, 33 bp, Homo sapiens
agaataacatgaacccaagcagaatcatgtttt

SEQ ID NO: 42981 - DNA, 33 bp, Homo sapiens
gtgagaaattgagaacaaaagagaggcactgtt

SEQ ID NO: 42982 - DNA, 33 bp, Homo sapiens
catgtatgtgattctcagaaaccagcaaaggag

SEQ ID NO: 42983 - DNA, 33 bp, Homo sapiens
atgttccagtgtaaaaattgtcaaagtggaatt

SEQ ID NO: 42984 - DNA, 33 bp, Homo sapiens
atcccactaagtggccgctgtttattacccagt

SEQ ID NO: 42985 - DNA, 33 bp, Homo sapiens
gattgcactttgagaaccctgctttataacttg

SEQ ID NO: 42986 - DNA, 33 bp, Homo sapiens
tgttgtcagtccacaaatagaagtgagagtgtt

SEQ ID NO: 42987 - DNA, 33 bp, Homo sapiens
ctaatgcaagctcgaaaccatttagagaactac

SEQ ID NO: 42988 - DNA, 33 bp, Homo sapiens
gtccctgaatcatcacactgagtggtctttttc

SEQ ID NO: 42989 - DNA, 51 bp, Homo sapiens
tgtttcttttttgcaggagactgcacagacacaactcactactgtatgttt

SEQ ID NO: 42990 - DNA, 33 bp, Homo sapiens
tgattcatggacaacagtaacatttttttcctg

SEQ ID NO: 42991 - DNA, 51 bp, Homo sapiens
ggaggaactttctaaaaactggtataaaatgagtaaaaaagcatagaacca

SEQ ID NO: 42992 - DNA, 33 bp, Homo sapiens
cactcactttgaacctcaaaaacctgacctggt

SEQ ID NO: 42993 - DNA, 33 bp, Homo sapiens
acatgaagttctggaacgggcagtttacgtact

SEQ ID NO: 42994 - DNA, 33 bp, Homo sapiens
aatttagtgctttaaaaaagtcaggctcttacc

SEQ ID NO: 42995 - DNA, 33 bp, Homo sapiens
ctatgaacttgttttcccctcattgaaagataa

SEQ ID NO: 42996 - DNA, 33 bp, Homo sapiens
tttttgacaggctctcactcaattgttcaggct

SEQ ID NO: 42997 - DNA, 33 bp, Homo sapiens
tgatgagtcactttcactccataacacaatctt

SEQ ID NO: 42998 - DNA, 33 bp, Homo sapiens
acaccaacattagatcaataactcctccgaatg

SEQ ID NO: 42999 - DNA, 51 bp, Homo sapiens
tatatggacaatttaaagttcattacaactttgcaggataaactgatgaaa

SEQ ID NO: 43000 - DNA, 51 bp, Homo sapiens
aaatagtttggagactatttgatgacgattggccctacagagtagtcagcc

SEQ ID NO: 43001 - DNA, 33 bp, Homo sapiens
gctaaatgtggtttaaatggtcttagggtttaa

SEQ ID NO: 43002 - DNA, 33 bp, Homo sapiens
tagatgacagatgctaataaggacgtcatcatt

SEQ ID NO: 43003 - DNA, 33 bp, Homo sapiens
gcagccaagctactaacgataaagccctctgat

SEQ ID NO: 43004 - DNA, 51 bp, Homo sapiens
attctgagactcatttcaagggtatgaagttaatgaaaagtattgtgtttg

SEQ ID NO: 43005 - DNA, 33 bp, Homo sapiens
tcacagcatatgatgactaagattctcaacatg

SEQ ID NO: 43006 - DNA, 33 bp, Homo sapiens
tcaagatttgaccttaagtttgcttctcttcat

SEQ ID NO: 43007 - DNA, 51 bp, Homo sapiens
caaggcatgtgataggagttctcaacaaataataacccatgtccttcatgg

SEQ ID NO: 43008 - DNA, 33 bp, Homo sapiens
attttaaaagcaggacaaggagcaggaaagcta

SEQ ID NO: 43009 - DNA, 33 bp, Homo sapiens
tcagaaagttccagaaatacaattggtcagaag

SEQ ID NO: 43010 - DNA, 33 bp, Homo sapiens
ctacaaataatcatcacgtgaaacaaagaacaa

SEQ ID NO: 43011 - DNA, 33 bp, Homo sapiens
acctaacacaaatggaaggaaaaaggagacaaa

SEQ ID NO: 43012 - DNA, 33 bp, Homo sapiens
aaaacagacatgaagaatctacaattgattggg

SEQ ID NO: 43013 - DNA, 33 bp, Homo sapiens
atattcagacactgcgaaactatgtagggtgaa

SEQ ID NO: 43014 - DNA, 33 bp, Homo sapiens
ctgttcaaccttaacaaaaaggagaataaatca

SEQ ID NO: 43015 - DNA, 33 bp, Homo sapiens
cgcagcatggacttaaaagctttaacctactct

SEQ ID NO: 43016 - DNA, 33 bp, Homo sapiens
caggttcttgattgcaggagtcagtggggaata

SEQ ID NO: 43017 - DNA, 33 bp, Homo sapiens
cgcagggacctggcacaagagtcagagcctagt

SEQ ID NO: 43018 - DNA, 33 bp, Homo sapiens
gataatgggatctgtcacatacactctagaggg

SEQ ID NO: 43019 - DNA, 33 bp, Homo sapiens
taccgaaaatatacaaacaactacaaatcaata

SEQ ID NO: 43020 - DNA, 33 bp, Homo sapiens
ggtcgtggtcatctaccatggctggatatgact

SEQ ID NO: 43021 - DNA, 33 bp, Homo sapiens
tcctcttctctataccaatgagctccaggagga

SEQ ID NO: 43022 - DNA, 33 bp, Homo sapiens
gataaccagagcataacaggtttctgtaggaag

SEQ ID NO: 43023 - DNA, 51 bp, Homo sapiens
gaaatactgctctaaacctcaatctccctgttatagaaagtgggaatcata

SEQ ID NO: 43024 - DNA, 33 bp, Homo sapiens
cttacactacatttacgagacaccgataatttt

SEQ ID NO: 43025 - DNA, 33 bp, Homo sapiens
gtctgagaaaaaccaagaagttcttttgtggaa

SEQ ID NO: 43026 - DNA, 33 bp, Homo sapiens
agatcagatgaataataaatgtgaagcccaaca

SEQ ID NO: 43027 - DNA, 33 bp, Homo sapiens
ttccatttctcaagcacgtggtttctgtagacc

SEQ ID NO: 43028 - DNA, 51 bp, Homo sapiens
aaacagccacctccccaacagatgcgtccatcccagcttctccggaatgga

SEQ ID NO: 43029 - DNA, 33 bp, Homo sapiens
gtttcaattcaagtccaaagggaagaaaaagca

SEQ ID NO: 43030 - DNA, 33 bp, Homo sapiens
tttattttctcaatgaagcagacattcactcca

SEQ ID NO: 43031 - DNA, 33 bp, Homo sapiens
gggaacaaggatccaactgctgcccctgctaga

SEQ ID NO: 43032 - DNA, 33 bp, Homo sapiens
gaccgcagaaactgttcaaaagagatgagccag

SEQ ID NO: 43033 - DNA, 33 bp, Homo sapiens
gtgatatgatgtttcaaaaatgaaggcagcaga

SEQ ID NO: 43034 - DNA, 33 bp, Homo sapiens
tacagcctgggctatcaaggtgtttgctaggcc

SEQ ID NO: 43035 - DNA, 33 bp, Homo sapiens
attcgtaatggtgccaatcttgccaaattgccc

SEQ ID NO: 43036 - DNA, 33 bp, Homo sapiens
atcaggtagatctgacaaacgtgggcaactgag

SEQ ID NO: 43037 - DNA, 33 bp, Homo sapiens
tgccgtttttgtagacactgttattctttttcc

SEQ ID NO: 43038 - DNA, 51 bp, Homo sapiens
gctgatagatcagaatccttttcaacgtagaagctgaggaaccactcccaa

SEQ ID NO: 43039 - DNA, 51 bp, Homo sapiens
ggtaggaaaaagaatttcagtgttacggtgataagagcttggggtaatttt

SEQ ID NO: 43040 - DNA, 33 bp, Homo sapiens
cttcagccaccatacaagtagcaaactggaatc

SEQ ID NO: 43041 - DNA, 33 bp, Homo sapiens
atataaagtagttaaacacataagtgggtgagt

SEQ ID NO: 43042 - DNA, 33 bp, Homo sapiens
ctttagggtttcaagacggcatttttaaggtcc

SEQ ID NO: 43043 - DNA, 33 bp, Homo sapiens
gagtctaataacatagccattccagagacattg

SEQ ID NO: 43044 - DNA, 33 bp, Homo sapiens
caggtatggaatcttacgtttgtactaatcgaa

SEQ ID NO: 43045 - DNA, 33 bp, Homo sapiens
tgaaaaccatcttagaaatgcctgcagactccc

SEQ ID NO: 43046 - DNA, 33 bp, Homo sapiens
gacaggatgtgatttacgtgtttgaaaggaaac

SEQ ID NO: 43047 - DNA, 33 bp, Homo sapiens
ttcttggtctcttacaatctttcctgtgaagag

SEQ ID NO: 43048 - DNA, 33 bp, Homo sapiens
actggtgttggattcaaaattcaagtcagcctg

SEQ ID NO: 43049 - DNA, 33 bp, Homo sapiens
taaatattgggtggaaatgctcatcgttagcag

SEQ ID NO: 43050 - DNA, 33 bp, Homo sapiens
gcccttcacggctagcggagctctaaagttcac

SEQ ID NO: 43051 - DNA, 51 bp, Homo sapiens
caatttttttcagcgtgttcttatacgcccattactgagctggtccctggg

SEQ ID NO: 43052 - DNA, 33 bp, Homo sapiens
taaacttttattgaccactctatctcgtatctg

SEQ ID NO: 43053 - DNA, 33 bp, Homo sapiens
tctgggccaaagagataaggtcatatgttccaa

SEQ ID NO: 43054 - DNA, 33 bp, Homo sapiens
atctgcgctataggaacgcacctctttggttac

SEQ ID NO: 43055 - DNA, 33 bp, Homo sapiens
taaaacaaaaaaaccacatgattctgtattctc

SEQ ID NO: 43056 - DNA, 33 bp, Homo sapiens
gatatgtagatttgccaagggagaggttaaaat

SEQ ID NO: 43057 - DNA, 33 bp, Homo sapiens
ggcacaaagcaggaaggactggttgttggagtg

SEQ ID NO: 43058 - DNA, 33 bp, Homo sapiens
gctacaaaaagacaaaaggaggtatagtgattg

SEQ ID NO: 43059 - DNA, 33 bp, Homo sapiens
tcaccagttacttctacgtacatttgcttttat

SEQ ID NO: 43060 - DNA, 33 bp, Homo sapiens
tacatgtaagaaacaccaagagcagcatgtggc

SEQ ID NO: 43061 - DNA, 33 bp, Homo sapiens
ttgtcattcaatctcacatacccaattttccta

SEQ ID NO: 43062 - DNA, 33 bp, Homo sapiens
gataaccactccaacaatgatccttcaaggtca

SEQ ID NO: 43063 - DNA, 33 bp, Homo sapiens
gatgcagactgggactcaagacgctggctcccc

SEQ ID NO: 43064 - DNA, 33 bp, Homo sapiens
ttaaactgtttctgtcaatttctttctttcttt

SEQ ID NO: 43065 - DNA, 33 bp, Homo sapiens
cttgttaagtgattgcccccttccccaaataaa

SEQ ID NO: 43066 - DNA, 33 bp, Homo sapiens
tgtgtttccaaccagacggctatgaagtgaacc

SEQ ID NO: 43067 - DNA, 33 bp, Homo sapiens
tgtagagactacacaacgatggcgagtaagaca

SEQ ID NO: 43068 - DNA, 51 bp, Homo sapiens
tcctgaaaattatactttttaataaaacctctgagaacaaatgctggttta

SEQ ID NO: 43069 - DNA, 33 bp, Homo sapiens
tttgttcgggacaccaagaacctgcaactgagt

SEQ ID NO: 43070 - DNA, 33 bp, Homo sapiens
gttcaaatctaaccaccggataggcaaacttgg

SEQ ID NO: 43071 - DNA, 33 bp, Homo sapiens
gacaatttctaaagataacacttgtcaatggcc

SEQ ID NO: 43072 - DNA, 33 bp, Homo sapiens
ctatagaatgcctaaaaaggaaattatttgtcc

SEQ ID NO: 43073 - DNA, 33 bp, Homo sapiens
catcttaacgatttgagcctcatgttttcttct

SEQ ID NO: 43074 - DNA, 33 bp, Homo sapiens
ataagaaagattgagaaatggaaaaataaaaag

SEQ ID NO: 43075 - DNA, 33 bp, Homo sapiens
aactactacatagaacagaaatagttacacaag

SEQ ID NO: 43076 - DNA, 33 bp, Homo sapiens
atgagttactctcgataaaaaagatactgcaac

SEQ ID NO: 43077 - DNA, 51 bp, Homo sapiens
aaaaggcaagataccaaaatatctgaaaaacataggggaaagagaaagacc

SEQ ID NO: 43078 - DNA, 33 bp, Homo sapiens
gaaggatctggtttgtaaaaagcattagcatag

SEQ ID NO: 43079 - DNA, 33 bp, Homo sapiens
ggactttgcttttgaacatacctttctctcatt

SEQ ID NO: 43080 - DNA, 33 bp, Homo sapiens
caggcctgaagtatcaaggagagaaggcgaaag

SEQ ID NO: 43081 - DNA, 33 bp, Homo sapiens
actccttccctgttacaagttctgcttcctgtg

SEQ ID NO: 43082 - DNA, 33 bp, Homo sapiens
ccagctggagagcaccagagtgtatttgcaagt

SEQ ID NO: 43083 - DNA, 33 bp, Homo sapiens
atatttaatttaaaaaacctgtctatcagctag

SEQ ID NO: 43084 - DNA, 33 bp, Homo sapiens
tttcagctgactggataaaataaggaaatacaa

SEQ ID NO: 43085 - DNA, 33 bp, Homo sapiens
gaggctcagtgcatcaactgcctgcagaaaata

SEQ ID NO: 43086 - DNA, 33 bp, Homo sapiens
agagggaagagtacaaattaaaatgtcagagat

SEQ ID NO: 43087 - DNA, 33 bp, Homo sapiens
atgacaacaccttcacaccttgatacaccagga

SEQ ID NO: 43088 - DNA, 33 bp, Homo sapiens
aggaagtttatcatcacagcagaattttctgat

SEQ ID NO: 43089 - DNA, 33 bp, Homo sapiens
ggcccagttagaaatgaagctggcattgagaat

SEQ ID NO: 43090 - DNA, 33 bp, Homo sapiens
aaaattaaaacaacccagcattgtgacccacat

SEQ ID NO: 43091 - DNA, 33 bp, Homo sapiens
ctgtctgatagatcaactaccaaatgaacctct

SEQ ID NO: 43092 - DNA, 51 bp, Homo sapiens
aattattttccactaacggtgaaacactaaatggacgacttcttatttatt

SEQ ID NO: 43093 - DNA, 51 bp, Homo sapiens
cttactagaaatggaaacaaacaaaagcttactctacaaaaaggaggaaaa

SEQ ID NO: 43094 - DNA, 33 bp, Homo sapiens
gcattccaaatgtctcacctcaagcaagcactt

SEQ ID NO: 43095 - DNA, 33 bp, Homo sapiens
taccacatcttctggtaaacaactcagcctatc

SEQ ID NO: 43096 - DNA, 33 bp, Homo sapiens
gctcctctacttgggcaaaaaggaagctttctc

SEQ ID NO: 43097 - DNA, 33 bp, Homo sapiens
cagactaatacagtaaagaagtacaattgctgg

SEQ ID NO: 43098 - DNA, 33 bp, Homo sapiens
atgttcatccactatcaccagcaattgtacttc

SEQ ID NO: 43099 - DNA, 33 bp, Homo sapiens
tatcattctattgatgaaaaatggaccacactt

SEQ ID NO: 43100 - DNA, 33 bp, Homo sapiens
aatttcataacaatcaaatcatgtgcttatttt

SEQ ID NO: 43101 - DNA, 33 bp, Homo sapiens
atggaagctaagaaaccagtaagtaagcaagaa

SEQ ID NO: 43102 - DNA, 33 bp, Homo sapiens
ctgccgtgtttcaccacgctaaatccgagaaat

SEQ ID NO: 43103 - DNA, 33 bp, Homo sapiens
aagtaacacatggaaaagttttaattctcacga

SEQ ID NO: 43104 - DNA, 33 bp, Homo sapiens
aaaaggtctgaacttaataaactataatttgtc

SEQ ID NO: 43105 - DNA, 33 bp, Homo sapiens
acacacaatatggtaaccgtggctgagaactgg

SEQ ID NO: 43106 - DNA, 51 bp, Homo sapiens
aacagcatatatatgcaagattagacctcccctgtaaaggaggtagctggg

SEQ ID NO: 43107 - DNA, 51 bp, Homo sapiens
gtgcccctttctgggggagagataaatggaagtaggatcactcagttttca

SEQ ID NO: 43108 - DNA, 33 bp, Homo sapiens
agagctggatctgggaggtaagagagagaaagc

SEQ ID NO: 43109 - DNA, 33 bp, Homo sapiens
tagccggaatgttttacggagcatcaaaggaca

SEQ ID NO: 43110 - DNA, 33 bp, Homo sapiens
ttatccctggaagttgcaaatgcagttgtagta

SEQ ID NO: 43111 - DNA, 33 bp, Homo sapiens
gggagcaaatcctaaacctcagaccactcactc

SEQ ID NO: 43112 - DNA, 33 bp, Homo sapiens
ctgaattgagataacactgaagattttattgct

SEQ ID NO: 43113 - DNA, 33 bp, Homo sapiens
gggattagatgagacactatctgtgaaagctct

SEQ ID NO: 43114 - DNA, 33 bp, Homo sapiens
cttttaattgggatcacgccaggggattagacc

SEQ ID NO: 43115 - DNA, 33 bp, Homo sapiens
gattttggttaccaacagtcaactgtgttccaa

SEQ ID NO: 43116 - DNA, 33 bp, Homo sapiens
caaatattccttagtcacataccactaccatgg

SEQ ID NO: 43117 - DNA, 33 bp, Homo sapiens
gcacaggtcactctaacgaatgacagctgtaat

SEQ ID NO: 43118 - DNA, 33 bp, Homo sapiens
ttcaaagtcttgtcagcctcagaattctagtcc

SEQ ID NO: 43119 - DNA, 33 bp, Homo sapiens
gtaaactggaaaactcgatgcaaatgtcaggtt

SEQ ID NO: 43120 - DNA, 33 bp, Homo sapiens
tatcacaggaatacaaatgttcacaggtactct

SEQ ID NO: 43121 - DNA, 33 bp, Homo sapiens
agcctgcttttctcaccgtattgttactcgttg

SEQ ID NO: 43122 - DNA, 33 bp, Homo sapiens
cacctgccaagacaaaaagacacgaatgagtac

SEQ ID NO: 43123 - DNA, 33 bp, Homo sapiens
acttgctccaacaggtcaacgtgattgaaaatt

SEQ ID NO: 43124 - DNA, 33 bp, Homo sapiens
atgctagctagtgttacgaagcgagcataaaca

SEQ ID NO: 43125 - DNA, 33 bp, Homo sapiens
attcaggtgctccccaaatgcagagccaccaac

SEQ ID NO: 43126 - DNA, 33 bp, Homo sapiens
ataggtccgtgcagaaacttgtacgtgaataat

SEQ ID NO: 43127 - DNA, 33 bp, Homo sapiens
gtcacgtggccagagaaaagaaagcatcaaacc

SEQ ID NO: 43128 - DNA, 33 bp, Homo sapiens
tacacccaccacagaaatctctattccctcctc

SEQ ID NO: 43129 - DNA, 33 bp, Homo sapiens
tacagattcaagagcacagtgaaccccaaatag

SEQ ID NO: 43130 - DNA, 33 bp, Homo sapiens
caccccaggactcacagcatggcaaaaatccaa

SEQ ID NO: 43131 - DNA, 33 bp, Homo sapiens
taagcgtctccatggcacgttctggacacacag

SEQ ID NO: 43132 - DNA, 33 bp, Homo sapiens
tcaaagagatccagtacggctaccgccgggtga

SEQ ID NO: 43133 - DNA, 33 bp, Homo sapiens
gggcaaccatgatgttcgtgttgcaatttgtac

SEQ ID NO: 43134 - DNA, 33 bp, Homo sapiens
tggacatggctcacaaacagttgttgattgact

SEQ ID NO: 43135 - DNA, 33 bp, Homo sapiens
gccaatgaaaaaagaacgcctggttgcgacgta

SEQ ID NO: 43136 - DNA, 33 bp, Homo sapiens
tagacctggaaatgacactgtgaatagacagga

SEQ ID NO: 43137 - DNA, 33 bp, Homo sapiens
agggattctttctgagaccaaaaaccctttccc

SEQ ID NO: 43138 - DNA, 33 bp, Homo sapiens
ataggaagttgtacacaggtatctacagtatga

SEQ ID NO: 43139 - DNA, 33 bp, Homo sapiens
ctgctctgggctccacacagattgtccgaacgc

SEQ ID NO: 43140 - DNA, 33 bp, Homo sapiens
tggcccggggtccagacagaaacagggagaccc

SEQ ID NO: 43141 - DNA, 33 bp, Homo sapiens
tctggcatcccagggaaatcctcaaggcctctg

SEQ ID NO: 43142 - DNA, 33 bp, Homo sapiens
gtccctttcctacgtgaagctacctgggtcaca

SEQ ID NO: 43143 - DNA, 33 bp, Homo sapiens
catggaagttctgcaccgcttttcacacacctt

SEQ ID NO: 43144 - DNA, 33 bp, Homo sapiens
tgtcttgtgctagtaggcactcagtgtgtatgt

SEQ ID NO: 43145 - DNA, 33 bp, Homo sapiens
ttggtgaaagaagaaactcaagcagaagattta

SEQ ID NO: 43146 - DNA, 33 bp, Homo sapiens
caataattaaacaagcagacaaaaatgacaagt

SEQ ID NO: 43147 - DNA, 33 bp, Homo sapiens
ttgacagattcaaatacgtacaaaaggctgggg

SEQ ID NO: 43148 - DNA, 33 bp, Homo sapiens
tgttttattcaatgtagcagagccttgccacag

SEQ ID NO: 43149 - DNA, 33 bp, Homo sapiens
tttaggcaaagtacacacattatcagatttggg

SEQ ID NO: 43150 - DNA, 33 bp, Homo sapiens
gccccagataatacaaaaaaatggccaacgttt

SEQ ID NO: 43151 - DNA, 33 bp, Homo sapiens
ggtgaagtctccataacgcagttcttaaaaaaa

SEQ ID NO: 43152 - DNA, 33 bp, Homo sapiens
agaactgcaagtctccacgtcgggtggcacaga

SEQ ID NO: 43153 - DNA, 33 bp, Homo sapiens
tgaagattggctcccaatgataggaaactgctg

SEQ ID NO: 43154 - DNA, 33 bp, Homo sapiens
tcatgtaaatattcagcaatgtgcttcctgtga

SEQ ID NO: 43155 - DNA, 33 bp, Homo sapiens
agagtcaaattaccgaccacttgtgcgggaaaa

SEQ ID NO: 43156 - DNA, 33 bp, Homo sapiens
ctcaggtgggctttgcaagggggtagatactga

SEQ ID NO: 43157 - DNA, 33 bp, Homo sapiens
gtaaactccagcaaaacgctaaactcactcatc

SEQ ID NO: 43158 - DNA, 33 bp, Homo sapiens
tcttctttaatcctccagcaagactaggtctcc

SEQ ID NO: 43159 - DNA, 33 bp, Homo sapiens
agcttctctcctggaggcaagtgcttcagtgta

SEQ ID NO: 43160 - DNA, 33 bp, Homo sapiens
gaaacagggaaaggacccaaaaatgcaaaatgc

SEQ ID NO: 43161 - DNA, 33 bp, Homo sapiens
cccacaggagaccggacgcgagcaagcgcacag

SEQ ID NO: 43162 - DNA, 33 bp, Homo sapiens
gtatcaaaacacatacaaaggatgaataagatg

SEQ ID NO: 43163 - DNA, 33 bp, Homo sapiens
caaggccgagcacctacagaaggtcaagttgca

SEQ ID NO: 43164 - DNA, 33 bp, Homo sapiens
attgtctgagcgcataccttgtgaattgtcata

SEQ ID NO: 43165 - DNA, 51 bp, Homo sapiens
ggtgcatcacactaagcacattataaacattagcttgctaagcccacaaca

SEQ ID NO: 43166 - DNA, 33 bp, Homo sapiens
agtcagagcgacagcaaaggaaacgggttcaag

SEQ ID NO: 43167 - DNA, 33 bp, Homo sapiens
gctctcagtataggtacgtgctagagacttgta

SEQ ID NO: 43168 - DNA, 33 bp, Homo sapiens
taaactcaagagtgcagaagaggtacctgagga

SEQ ID NO: 43169 - DNA, 33 bp, Homo sapiens
gagagaaagggtcacaggctataggactccatg

SEQ ID NO: 43170 - DNA, 33 bp, Homo sapiens
gaattccagggatttgcagattactccagagta

SEQ ID NO: 43171 - DNA, 33 bp, Homo sapiens
cctctaatattggccaatctttcacctaccttt

SEQ ID NO: 43172 - DNA, 33 bp, Homo sapiens
atcacagggttattgacggatttactagataca

SEQ ID NO: 43173 - DNA, 33 bp, Homo sapiens
taaagatccagaactcaccctgatgaaaatttc

SEQ ID NO: 43174 - DNA, 33 bp, Homo sapiens
cttattagagtgtctaagaagtgtcctctgttc

SEQ ID NO: 43175 - DNA, 33 bp, Homo sapiens
tctctggtgagattcacgtttctaactcgtata

SEQ ID NO: 43176 - DNA, 33 bp, Homo sapiens
tgattttgcatcatgaacctagtcacagtatcc

SEQ ID NO: 43177 - DNA, 33 bp, Homo sapiens
gggctggaaaaaagcacgtcccaggaagaagcc

SEQ ID NO: 43178 - DNA, 33 bp, Homo sapiens
aacccagctgagaaaacgatgatatcttcctgt

SEQ ID NO: 43179 - DNA, 33 bp, Homo sapiens
gagagtcttccagctacgtactcaagatcttag

SEQ ID NO: 43180 - DNA, 33 bp, Homo sapiens
ttgtaaatgggacctgcacagattgctaagtct

SEQ ID NO: 43181 - DNA, 33 bp, Homo sapiens
attttatgacatattacaaacattggatacatt

SEQ ID NO: 43182 - DNA, 33 bp, Homo sapiens
agtagggcacccataaataattcctaagttact

SEQ ID NO: 43183 - DNA, 33 bp, Homo sapiens
attgatgaaatttcctcaactgtgtgccatttt

SEQ ID NO: 43184 - DNA, 33 bp, Homo sapiens
tagatgtggtgagctaactttattcacctcagt

SEQ ID NO: 43185 - DNA, 33 bp, Homo sapiens
gtgaacgatagtagtccattcctgattcattct

SEQ ID NO: 43186 - DNA, 33 bp, Homo sapiens
atgtagcctattttagcagtccaggaaagcagg

SEQ ID NO: 43187 - DNA, 33 bp, Homo sapiens
ggcctgctgtctaccacgtattgtgttcaacag

SEQ ID NO: 43188 - DNA, 33 bp, Homo sapiens
aacaatcggatgtccacaatgcaaactatacat

SEQ ID NO: 43189 - DNA, 33 bp, Homo sapiens
gtcaagccagtcaagacggaaatttgtccattg

SEQ ID NO: 43190 - DNA, 33 bp, Homo sapiens
gtatgaagcatttaaccatgaagtcttctgttg

SEQ ID NO: 43191 - DNA, 33 bp, Homo sapiens
cagttctgccatccaccagacaggaaagttata

SEQ ID NO: 43192 - DNA, 33 bp, Homo sapiens
tctcgttgggaactcagactttaccctaaggac

SEQ ID NO: 43193 - DNA, 33 bp, Homo sapiens
ttttctcaaaggtagacgtgatcactagtttga

SEQ ID NO: 43194 - DNA, 33 bp, Homo sapiens
gaagccccagaatttcaatgttctcaggaatca

SEQ ID NO: 43195 - DNA, 33 bp, Homo sapiens
ataagggaaggtaccactgggcagtttcagacc

SEQ ID NO: 43196 - DNA, 51 bp, Homo sapiens
aacctagtctttgctgaggacaagacatgttgacaaacccaggcacaagga

SEQ ID NO: 43197 - DNA, 33 bp, Homo sapiens
cttgcaataacggctccgacattcccttaaact

SEQ ID NO: 43198 - DNA, 33 bp, Homo sapiens
cccaaggaaacaccctaagaaagacagagagta

SEQ ID NO: 43199 - DNA, 33 bp, Homo sapiens
taattgaattctctgccaaaccctgtccgccgt

SEQ ID NO: 43200 - DNA, 33 bp, Homo sapiens
tagccatctagctatcaatccatacagccatcc

SEQ ID NO: 43201 - DNA, 33 bp, Homo sapiens
ccacacatccctgaatcacttgttaaaacctag

SEQ ID NO: 43202 - DNA, 33 bp, Homo sapiens
gccagtggaaatgggacagtaagcactgagtaa

SEQ ID NO: 43203 - DNA, 33 bp, Homo sapiens
catatttaaggacaagcacaaagaactcttagt

SEQ ID NO: 43204 - DNA, 33 bp, Homo sapiens
atatttcttaaacttacggtcatcaaagacctc

SEQ ID NO: 43205 - DNA, 33 bp, Homo sapiens
aaaaccattggattctaaaggtagaggtcaccc

SEQ ID NO: 43206 - DNA, 51 bp, Homo sapiens
cagatattgagaaagaataccttttgatagaagacacgtttaggggaaaat

SEQ ID NO: 43207 - DNA, 33 bp, Homo sapiens
gatgaaatgtgaaatcgaaccgttcagactaaa

SEQ ID NO: 43208 - DNA, 33 bp, Homo sapiens
tagaatccagctttcccgacttgaagtacaaat

SEQ ID NO: 43209 - DNA, 33 bp, Homo sapiens
gtcataagacttttcacgagaaatggctgagat

SEQ ID NO: 43210 - DNA, 33 bp, Homo sapiens
tgattcaatctgtgcactcagaatccactgaat

SEQ ID NO: 43211 - DNA, 33 bp, Homo sapiens
ctgtaaaatgggaaaactgtagccgtacttgct

SEQ ID NO: 43212 - DNA, 33 bp, Homo sapiens
cttgtacatatccaccagaactcttgggtgatt

SEQ ID NO: 43213 - DNA, 33 bp, Homo sapiens
ggttcagactgtaagaaacatcctgcccatctg

SEQ ID NO: 43214 - DNA, 33 bp, Homo sapiens
ctgatgctaatctctcccaaaaacaccatccgt

SEQ ID NO: 43215 - DNA, 33 bp, Homo sapiens
tcactaatcaagttgacgaggtcagcaacagtc

SEQ ID NO: 43216 - DNA, 33 bp, Homo sapiens
cagaggctttctgaaactctgcaggcaagaaaa

SEQ ID NO: 43217 - DNA, 33 bp, Homo sapiens
gatacttgtgaagaaaactgtcagcatgtggaa

SEQ ID NO: 43218 - DNA, 33 bp, Homo sapiens
atgttcgtagcacaaacgcatcaatggcaaccg

SEQ ID NO: 43219 - DNA, 33 bp, Homo sapiens
tgcttgagtgcactgacagccaaattacccaaa

SEQ ID NO: 43220 - DNA, 33 bp, Homo sapiens
aggagagaagcttggacatgtgtgcagggtgat

SEQ ID NO: 43221 - DNA, 33 bp, Homo sapiens
cacgaaacaacgtgtacaagacaagcaatctgg

SEQ ID NO: 43222 - DNA, 33 bp, Homo sapiens
ggattacttacagtaaatgaaaaccaagacttg

SEQ ID NO: 43223 - DNA, 33 bp, Homo sapiens
aatttgttaattaagaatagatggtgagctgtc

SEQ ID NO: 43224 - DNA, 33 bp, Homo sapiens
atgggcaaaggccagaagcaggaaccaaaggag

SEQ ID NO: 43225 - DNA, 33 bp, Homo sapiens
agaggagccaatgccacaaagaagcaacatcca

SEQ ID NO: 43226 - DNA, 33 bp, Homo sapiens
ctgtggaaacaggaagactgagacctagagaag

SEQ ID NO: 43227 - DNA, 33 bp, Homo sapiens
gctttttggcagcatccaacccatagcaaagcc

SEQ ID NO: 43228 - DNA, 33 bp, Homo sapiens
tagtttctgtgtctccccccttcaacaattttc

SEQ ID NO: 43229 - DNA, 33 bp, Homo sapiens
atctctaaattcatcaagttgcatacattaaat

SEQ ID NO: 43230 - DNA, 33 bp, Homo sapiens
ttaaggaagacccccccaaattgtataagcctc

SEQ ID NO: 43231 - DNA, 33 bp, Homo sapiens
gagcacctgagttcaacctactgttctgcattt

SEQ ID NO: 43232 - DNA, 33 bp, Homo sapiens
aaaacattaaattaagaaattcatcaccacatt

SEQ ID NO: 43233 - DNA, 33 bp, Homo sapiens
tatcagtgaagaaacactgagatattaaacagt

SEQ ID NO: 43234 - DNA, 33 bp, Homo sapiens
atgtagcaaacctgtccaagtctgcgtgtccga

SEQ ID NO: 43235 - DNA, 33 bp, Homo sapiens
gaatgtgatatagatacgtagtagccacatttt

SEQ ID NO: 43236 - DNA, 33 bp, Homo sapiens
aaaaatattcgcttgacgcacagtgggattata

SEQ ID NO: 43237 - DNA, 33 bp, Homo sapiens
ttgagcaatggccctcgttaattttatcagata

SEQ ID NO: 43238 - DNA, 33 bp, Homo sapiens
gtatgttattttacacacaaaagacagagtgtt

SEQ ID NO: 43239 - DNA, 33 bp, Homo sapiens
agacatagaagcaaaggaatagcacagggagtc

SEQ ID NO: 43240 - DNA, 33 bp, Homo sapiens
aagtgctctttcccgacaacttgaacacttaaa

SEQ ID NO: 43241 - DNA, 33 bp, Homo sapiens
cagattgcttggtatacatcgtactgagtggga

SEQ ID NO: 43242 - DNA, 33 bp, Homo sapiens
gaaccagaaacgtagacggttttgcaaatgaac

SEQ ID NO: 43243 - DNA, 33 bp, Homo sapiens
ttctctcagaagtggacgccaagaaggaatttg

SEQ ID NO: 43244 - DNA, 33 bp, Homo sapiens
ccagaagaagaattgaaaatagagacatacaaa

SEQ ID NO: 43245 - DNA, 33 bp, Homo sapiens
ttttcaattgagaaagcaatcttcagtgcaaag

SEQ ID NO: 43246 - DNA, 33 bp, Homo sapiens
atcttgtcttctcttacgcactaattgtgtctt

SEQ ID NO: 43247 - DNA, 33 bp, Homo sapiens
tccccagagcccaatagagtgaatgcatgcagt

SEQ ID NO: 43248 - DNA, 33 bp, Homo sapiens
cccaagttctcacatcactcaaacaatggaggt

SEQ ID NO: 43249 - DNA, 51 bp, Homo sapiens
tatatatgtatatatttatttgcatattgtggttcaccccttctagactgt

SEQ ID NO: 43250 - DNA, 33 bp, Homo sapiens
ctccacctctccaccaataccaatcttcccaag

SEQ ID NO: 43251 - DNA, 33 bp, Homo sapiens
ctgtacattaataccccaagaggcaatgtaagg

SEQ ID NO: 43252 - DNA, 33 bp, Homo sapiens
agtcctgcgctacagaaacggtttaaacttatt

SEQ ID NO: 43253 - DNA, 33 bp, Homo sapiens
aatgtgcctgtatccaaaagaaatgaaacctgc

SEQ ID NO: 43254 - DNA, 33 bp, Homo sapiens
gacagaaaagtcctacaaggaggctgtcagcac

SEQ ID NO: 43255 - DNA, 33 bp, Homo sapiens
ttgaaagacccacagaagagtttgcataagagc

SEQ ID NO: 43256 - DNA, 33 bp, Homo sapiens
acgtgaaggatttgcacaggccattcacagatg

SEQ ID NO: 43257 - DNA, 33 bp, Homo sapiens
acatgtgagtgcttcacgttatcgtagtgtcat

SEQ ID NO: 43258 - DNA, 33 bp, Homo sapiens
agggtgactgaccccaaaaaccatgaacaaagg

SEQ ID NO: 43259 - DNA, 33 bp, Homo sapiens
cacaagggattgatcaaagaggttgcctcaggc

SEQ ID NO: 43260 - DNA, 33 bp, Homo sapiens
tcttagggacataataaagtcacaaacttacag

SEQ ID NO: 43261 - DNA, 33 bp, Homo sapiens
ctaaaaagaaacaggcagacaaaggatcactga

SEQ ID NO: 43262 - DNA, 33 bp, Homo sapiens
tgcaaagtgaacatacacatttaagagagaagt

SEQ ID NO: 43263 - DNA, 33 bp, Homo sapiens
gagatctctcacgaaacaaacaagatcaaggat

SEQ ID NO: 43264 - DNA, 33 bp, Homo sapiens
tcgtccatcctagtaccatgcgtcattttcttt

SEQ ID NO: 43265 - DNA, 33 bp, Homo sapiens
cttgatggacgcgagtaaaagagatgtagtcct

SEQ ID NO: 43266 - DNA, 33 bp, Homo sapiens
ctctgttggctgagtacagtagctcatgcttgt

SEQ ID NO: 43267 - DNA, 33 bp, Homo sapiens
catgtaattttggagcgataaaggcctaattag

SEQ ID NO: 43268 - DNA, 33 bp, Homo sapiens
gaggctaagtctttggaagaggaggagaattaa

SEQ ID NO: 43269 - DNA, 33 bp, Homo sapiens
gtggtgatgataagtacgataaacccatgcctg

SEQ ID NO: 43270 - DNA, 33 bp, Homo sapiens
ccctcagtggagggcaactgttgctcacttgtc

SEQ ID NO: 43271 - DNA, 33 bp, Homo sapiens
tattctcattcgctcaatctgccagccctggct

SEQ ID NO: 43272 - DNA, 51 bp, Homo sapiens
gcttcagtgggcactgtagtttgaacacctggatgccaaaaacagaaaaca

SEQ ID NO: 43273 - DNA, 33 bp, Homo sapiens
acgggctcccaggctacgtgtctcaagtccgcc

SEQ ID NO: 43274 - DNA, 33 bp, Homo sapiens
gacgaggacccagtcaaaaatttctctcatatc

SEQ ID NO: 43275 - DNA, 33 bp, Homo sapiens
ttttcattagagaaaacagtgaacatgttaagt

SEQ ID NO: 43276 - DNA, 33 bp, Homo sapiens
aagtctcctggagtcactcttctcttcattata

SEQ ID NO: 43277 - DNA, 33 bp, Homo sapiens
actaggaccctctgagaagctggaagaaatcac

SEQ ID NO: 43278 - DNA, 51 bp, Homo sapiens
ttagatatgagtatcctcaggagtcaaaacatctcttgccttaagttctgt

SEQ ID NO: 43279 - DNA, 33 bp, Homo sapiens
cagagtggatccgaacactttacagaaattgga

SEQ ID NO: 43280 - DNA, 33 bp, Homo sapiens
ggtagtaagtacttagcagatactcaaagaggt

SEQ ID NO: 43281 - DNA, 33 bp, Homo sapiens
gggaaaccatgacaataaaggaagaacttgcac

SEQ ID NO: 43282 - DNA, 33 bp, Homo sapiens
gtcagatcagctgagtcaaacctggcagttcca

SEQ ID NO: 43283 - DNA, 51 bp, Homo sapiens
aagtgaaaggctctgacacactctacggtggaaaacacattcatcattgca

SEQ ID NO: 43284 - DNA, 33 bp, Homo sapiens
actctgcatgtttccaagaaaggcttctctcct

SEQ ID NO: 43285 - DNA, 33 bp, Homo sapiens
attttcagggtaatcacaaataggggtggttaa

SEQ ID NO: 43286 - DNA, 33 bp, Homo sapiens
ggagtcctctaccacacgtgaatcttgaatatt

SEQ ID NO: 43287 - DNA, 33 bp, Homo sapiens
ctttcatgctaacatgcaaagaaaggtacctgc

SEQ ID NO: 43288 - DNA, 33 bp, Homo sapiens
actgccagcatctctaaccatctgattaggttt

SEQ ID NO: 43289 - DNA, 33 bp, Homo sapiens
ggagtgcttctcaatcaagggcaactgtcccac

SEQ ID NO: 43290 - DNA, 33 bp, Homo sapiens
cagaattggtggttaaatacatggaaaacaaga

SEQ ID NO: 43291 - DNA, 33 bp, Homo sapiens
acgccaaatgaggtacagggaagggactttaca

SEQ ID NO: 43292 - DNA, 33 bp, Homo sapiens
ccctcagctcttctacaagtggacgtggaatga

SEQ ID NO: 43293 - DNA, 33 bp, Homo sapiens
accacgcagacctcaccggttctcccgctgtgc

SEQ ID NO: 43294 - DNA, 33 bp, Homo sapiens
acctatattagaatgccgaaaaataacaaaaac

SEQ ID NO: 43295 - DNA, 33 bp, Homo sapiens
agctagtattttttgcgagtagatatgtacatt

SEQ ID NO: 43296 - DNA, 33 bp, Homo sapiens
atagctctcacttttaagacatctcatctgatc

SEQ ID NO: 43297 - DNA, 33 bp, Homo sapiens
tctgagaaggtatccacgagctccatctgactg

SEQ ID NO: 43298 - DNA, 33 bp, Homo sapiens
aactgttttttgaagcaaagaatgcagaactag

SEQ ID NO: 43299 - DNA, 33 bp, Homo sapiens
atgagtgcttcactgcccttttacttgcatctt

SEQ ID NO: 43300 - DNA, 33 bp, Homo sapiens
tggaatccagggtgaccaaggcatgacaagggt

SEQ ID NO: 43301 - DNA, 33 bp, Homo sapiens
tcatcaccacaggcgacataactgaagctcaaa

SEQ ID NO: 43302 - DNA, 33 bp, Homo sapiens
ggttggaccaaagaaaaaccatctgcaagcctg

SEQ ID NO: 43303 - DNA, 33 bp, Homo sapiens
tcccagctgcaaaatacacccaacctggtgata

SEQ ID NO: 43304 - DNA, 33 bp, Homo sapiens
tcactgccatgtactacgctaagcgctttacat

SEQ ID NO: 43305 - DNA, 33 bp, Homo sapiens
cagaatggtgttcccacggtgctgttgtttaag

SEQ ID NO: 43306 - DNA, 33 bp, Homo sapiens
aaggtcaattaggcacaccattagagactattc

SEQ ID NO: 43307 - DNA, 33 bp, Homo sapiens
aacaaaggaccgatatcaagaatatattaagaa

SEQ ID NO: 43308 - DNA, 33 bp, Homo sapiens
ccgaatggctgggtgaaagtctgacctagaaga

SEQ ID NO: 43309 - DNA, 33 bp, Homo sapiens
catcccaaaagttccaggtgggttcagacagga

SEQ ID NO: 43310 - DNA, 33 bp, Homo sapiens
caggtatttggtctaaactcaccaaaaggacag

SEQ ID NO: 43311 - DNA, 33 bp, Homo sapiens
gaaattgaagaaatacccaaattcttgctgaag

SEQ ID NO: 43312 - DNA, 33 bp, Homo sapiens
cactctgtacctcacaagaatgaactggaaaat

SEQ ID NO: 43313 - DNA, 33 bp, Homo sapiens
aggctggatgatgtcccgctgatctattgctgt

SEQ ID NO: 43314 - DNA, 33 bp, Homo sapiens
taaaatagcccttgcacgatgacagttttatat

SEQ ID NO: 43315 - DNA, 33 bp, Homo sapiens
gcttgaatacaagtacacctggttccaggaact

SEQ ID NO: 43316 - DNA, 33 bp, Homo sapiens
ctcttatcatcttcccacaaaactgaaaaatct

SEQ ID NO: 43317 - DNA, 33 bp, Homo sapiens
tcctccacctcaataacacgtttgcagtttaca

SEQ ID NO: 43318 - DNA, 33 bp, Homo sapiens
gtttggaaggttctccactctatctgaaagccc

SEQ ID NO: 43319 - DNA, 33 bp, Homo sapiens
atgtatgtttacacgccctggttgcctgctcat

SEQ ID NO: 43320 - DNA, 33 bp, Homo sapiens
cactggtgggaagcatcagaagatgtgaagagc

SEQ ID NO: 43321 - DNA, 33 bp, Homo sapiens
aagatttttaagcagcagagtaacatggttcag

SEQ ID NO: 43322 - DNA, 33 bp, Homo sapiens
taaacctgcctcaaacagagatttctctttggt

SEQ ID NO: 43323 - DNA, 33 bp, Homo sapiens
ctgggggaagaatagaaacatgcaatagggtct

SEQ ID NO: 43324 - DNA, 33 bp, Homo sapiens
aaataaacataatcaacaaaggaagcggctttg

SEQ ID NO: 43325 - DNA, 33 bp, Homo sapiens
taagtcataaaggatggatagcacacaaaagac

SEQ ID NO: 43326 - DNA, 33 bp, Homo sapiens
tttccagaggtttggacgattatgcggggagca

SEQ ID NO: 43327 - DNA, 33 bp, Homo sapiens
ggctctagggaggaataaagagtggtcaagtgc

SEQ ID NO: 43328 - DNA, 33 bp, Homo sapiens
tcagtcagtgttgctacaaatctaggcacctgt

SEQ ID NO: 43329 - DNA, 33 bp, Homo sapiens
atctgaaatgtgtgaaaaaatagtaaatattta

SEQ ID NO: 43330 - DNA, 33 bp, Homo sapiens
aggcactagctcatcagaaatattagctattac

SEQ ID NO: 43331 - DNA, 33 bp, Homo sapiens
ctctgcaatgattagaatcccaagaaaaggtca

SEQ ID NO: 43332 - DNA, 33 bp, Homo sapiens
tgacgctattgtgttaactgccaggttcctctt

SEQ ID NO: 43333 - DNA, 33 bp, Homo sapiens
agtgtctggtaatgagacataagttaaatgcca

SEQ ID NO: 43334 - DNA, 33 bp, Homo sapiens
tattatctgagaataaagatgccttacaacagt

SEQ ID NO: 43335 - DNA, 33 bp, Homo sapiens
ggagagaagattgtaccaatagttcgtctctgg

SEQ ID NO: 43336 - DNA, 33 bp, Homo sapiens
cttctttgcacttatccatttctagggacagat

SEQ ID NO: 43337 - DNA, 51 bp, Homo sapiens
gccttgcccctctacttgacagccaatgaagagcacagacttgggagccac

SEQ ID NO: 43338 - DNA, 33 bp, Homo sapiens
tgagttatgagtccaccaccacctccaaaactt

SEQ ID NO: 43339 - DNA, 33 bp, Homo sapiens
atagtggtgacaaagacgtttgattcacaaaga

SEQ ID NO: 43340 - DNA, 33 bp, Homo sapiens
ggaaagatagcgaaaaagttgttactatcacac

SEQ ID NO: 43341 - DNA, 33 bp, Homo sapiens
acgccatgagaatttacgcttggcttagtgttc

SEQ ID NO: 43342 - DNA, 33 bp, Homo sapiens
gccaaggcagagacaactggcgagctcgctcag

SEQ ID NO: 43343 - DNA, 33 bp, Homo sapiens
gcagccctacaagaggaaaagagtcagtcctgg

SEQ ID NO: 43344 - DNA, 33 bp, Homo sapiens
ttcatatttaaagcccagattcaaagaaccaaa

SEQ ID NO: 43345 - DNA, 33 bp, Homo sapiens
gaacccaccaatttcgaacacaacttcactcct

SEQ ID NO: 43346 - DNA, 33 bp, Homo sapiens
cattgctaagcccccacaggaccgtggaagggg

SEQ ID NO: 43347 - DNA, 33 bp, Homo sapiens
cctgatgtctttgaaaagtgttctgggcaagct

SEQ ID NO: 43348 - DNA, 33 bp, Homo sapiens
tcacaaaaccagaatcccattgaacttccgcaa

SEQ ID NO: 43349 - DNA, 33 bp, Homo sapiens
gcttctgtctccctaactcagtgcaggccacaa

SEQ ID NO: 43350 - DNA, 33 bp, Homo sapiens
agatcagtgcctgacacattgtggacattccat

SEQ ID NO: 43351 - DNA, 33 bp, Homo sapiens
ggaggacctcatgatcactaactggaggagatg

SEQ ID NO: 43352 - DNA, 33 bp, Homo sapiens
gaaggaagaccagtaacgctggagggcagtgag

SEQ ID NO: 43353 - DNA, 33 bp, Homo sapiens
gcagaccttttttgtcactcacatatacattaa

SEQ ID NO: 43354 - DNA, 33 bp, Homo sapiens
tgtggaagacagggacaggtcagcttggccaag

SEQ ID NO: 43355 - DNA, 33 bp, Homo sapiens
tcctgagttctttccacaggacgcgcatcccaa

SEQ ID NO: 43356 - DNA, 51 bp, Homo sapiens
aatcagccataggttcccaaggaataaaattgataggaaaagctatctaga

SEQ ID NO: 43357 - DNA, 33 bp, Homo sapiens
agtgctcacgaaaagacgaacacacataagcac

SEQ ID NO: 43358 - DNA, 33 bp, Homo sapiens
acactttcctgaaacacctgcttggcttgttcc

SEQ ID NO: 43359 - DNA, 33 bp, Homo sapiens
ccctggatctggaaagcagacagcccaggtgct

SEQ ID NO: 43360 - DNA, 33 bp, Homo sapiens
gatggagggcagtggaatagcggagagtagtgg

SEQ ID NO: 43361 - DNA, 33 bp, Homo sapiens
ccatcccatctaccaaacccctcaagtcccagg

SEQ ID NO: 43362 - DNA, 33 bp, Homo sapiens
tttctccttgacagcaagaaaatgttctaaaac

SEQ ID NO: 43363 - DNA, 33 bp, Homo sapiens
atagctgggtactcaccagggcccatctttttt

SEQ ID NO: 43364 - DNA, 33 bp, Homo sapiens
agagttagtgacatgcacatagaaaaccaagca

SEQ ID NO: 43365 - DNA, 33 bp, Homo sapiens
aaaatccaggcttctcaatatgatctagcccct

SEQ ID NO: 43366 - DNA, 33 bp, Homo sapiens
atggtgacaacagtaacaataatatggtgataa

SEQ ID NO: 43367 - DNA, 33 bp, Homo sapiens
gttcatccacttggtagcttttttctagtgtaa

SEQ ID NO: 43368 - DNA, 33 bp, Homo sapiens
aggtataaaatttgccacaggagactgatctta

SEQ ID NO: 43369 - DNA, 33 bp, Homo sapiens
tgaattttcccacagacgttgcagattttatta

SEQ ID NO: 43370 - DNA, 33 bp, Homo sapiens
tgagactgcgtcgttgcatttagcttaagttgt

SEQ ID NO: 43371 - DNA, 33 bp, Homo sapiens
cagcacttctcagtaccaattacagaggctgaa

SEQ ID NO: 43372 - DNA, 33 bp, Homo sapiens
ctacgcacccaacaaacgtttatttccttcact

SEQ ID NO: 43373 - DNA, 33 bp, Homo sapiens
cttgcagacagttacaaaggtcacatatatagc

SEQ ID NO: 43374 - DNA, 33 bp, Homo sapiens
aagcagaaccaacgaacagagagaaactgaatt

SEQ ID NO: 43375 - DNA, 33 bp, Homo sapiens
cctggttttgattatacgccctgccccttggct

SEQ ID NO: 43376 - DNA, 33 bp, Homo sapiens
ctgattgaccagagtccgaatccaaagtctccc

SEQ ID NO: 43377 - DNA, 33 bp, Homo sapiens
gaactctgaaccacacagatgcaagaccatttc

SEQ ID NO: 43378 - DNA, 33 bp, Homo sapiens
tttaaagtatactgcacagattattttcaaata

SEQ ID NO: 43379 - DNA, 33 bp, Homo sapiens
gcaaatgattttaaaactgcgtaatgcaaagga

SEQ ID NO: 43380 - DNA, 51 bp, Homo sapiens
atatccggtgtgttacaacacatgccattagcaaagatattcaaactcatg

SEQ ID NO: 43381 - DNA, 33 bp, Homo sapiens
tgctgaaaaaaagtaaatcgtgtgcatgaattc

SEQ ID NO: 43382 - DNA, 33 bp, Homo sapiens
cacattttggtcctcaagaaggaagaaagatgg

SEQ ID NO: 43383 - DNA, 33 bp, Homo sapiens
cccgggtgccactgacagggccggtgaaggaaa

SEQ ID NO: 43384 - DNA, 33 bp, Homo sapiens
gttctcgtcgcccagccaggtgccattggggta

SEQ ID NO: 43385 - DNA, 33 bp, Homo sapiens
atgggctaactacttacggtgcactcaggctaa

SEQ ID NO: 43386 - DNA, 33 bp, Homo sapiens
aaggtcctattatgcacggttggtttccagtaa

SEQ ID NO: 43387 - DNA, 33 bp, Homo sapiens
aggaaaacaaaccacactgatacaaagaccaag

SEQ ID NO: 43388 - DNA, 33 bp, Homo sapiens
ttattctgtgaactcaccttatctggttctttc

SEQ ID NO: 43389 - DNA, 33 bp, Homo sapiens
gcccaactactcaaccaaccacctagcacaacc

SEQ ID NO: 43390 - DNA, 33 bp, Homo sapiens
ctgcagactggtaacgcacacttggcagggtgc

SEQ ID NO: 43391 - DNA, 33 bp, Homo sapiens
ttaacctgcatatataactatcactgtaatact

SEQ ID NO: 43392 - DNA, 33 bp, Homo sapiens
tgcttatgttgtaccaagttatatgatgttgcc

SEQ ID NO: 43393 - DNA, 33 bp, Homo sapiens
gatggcagcaggaatacagaggtaggcaaggta

SEQ ID NO: 43394 - DNA, 33 bp, Homo sapiens
cccagccgatctggcaaacttctcatccttcaa

SEQ ID NO: 43395 - DNA, 33 bp, Homo sapiens
acagctttatcaggtaaaatatccttggttggc

SEQ ID NO: 43396 - DNA, 33 bp, Homo sapiens
aaagagagaaaggcacaagtcaggatttgggtt

SEQ ID NO: 43397 - DNA, 33 bp, Homo sapiens
ggccacacacagtggaagaagggtagtttctga

SEQ ID NO: 43398 - DNA, 33 bp, Homo sapiens
gatcagtgaagcctcaactaccccacgggttct

SEQ ID NO: 43399 - DNA, 33 bp, Homo sapiens
ctatggcgaccaatagcaataggaccacaccta

SEQ ID NO: 43400 - DNA, 33 bp, Homo sapiens
cggcccctggccagcacacgaatcagaaggaaa

SEQ ID NO: 43401 - DNA, 33 bp, Homo sapiens
tggttcatcctattaacgggagcagtacaaaac

SEQ ID NO: 43402 - DNA, 33 bp, Homo sapiens
ttattccagttgctccgctcattgtgaatatgg

SEQ ID NO: 43403 - DNA, 33 bp, Homo sapiens
accaagacacagaggacagaagtaacttgttca

SEQ ID NO: 43404 - DNA, 33 bp, Homo sapiens
ttcaaggggacataacagtaggtggccgtgcca

SEQ ID NO: 43405 - DNA, 33 bp, Homo sapiens
cacccatgaacccatcactcaactcaagaacta

SEQ ID NO: 43406 - DNA, 51 bp, Homo sapiens
atgaattttatttaatccttgaggaaatggttcttttctcacacacataaa

SEQ ID NO: 43407 - DNA, 33 bp, Homo sapiens
gagtctgctaccttccaaccctgagtctgtatg

SEQ ID NO: 43408 - DNA, 33 bp, Homo sapiens
ctatacaggaccattcccgtgaaaagttgaaag

SEQ ID NO: 43409 - DNA, 33 bp, Homo sapiens
taccttttagactttgcaggaaataacagtaca

SEQ ID NO: 43410 - DNA, 33 bp, Homo sapiens
gcatcttcctcgcagaaaagtcactcccattat

SEQ ID NO: 43411 - DNA, 33 bp, Homo sapiens
ttggaacttgctacctaacctcacagtccctca

SEQ ID NO: 43412 - DNA, 33 bp, Homo sapiens
caggactttgtttggggagcgtgttaagttagc

SEQ ID NO: 43413 - DNA, 33 bp, Homo sapiens
tcacattacaaaatccagaaccatttaacctag

SEQ ID NO: 43414 - DNA, 33 bp, Homo sapiens
tgagctggcaaatcaaatctcatatgcatgagt

SEQ ID NO: 43415 - DNA, 33 bp, Homo sapiens
tggctatcataacatacaagtcctagagctctg

SEQ ID NO: 43416 - DNA, 33 bp, Homo sapiens
tcaaccaggagtaaagccttcttagcaactaag

SEQ ID NO: 43417 - DNA, 33 bp, Homo sapiens
gagagaaaactggagaaattagaataacgggtt

SEQ ID NO: 43418 - DNA, 33 bp, Homo sapiens
ttggaaatgctggaaaccacaatggcagaacca

SEQ ID NO: 43419 - DNA, 33 bp, Homo sapiens
ggggagatgggtttgaatacataggcaacagca

SEQ ID NO: 43420 - DNA, 33 bp, Homo sapiens
atatgtatagtagcacgggacaaatagtaaata

SEQ ID NO: 43421 - DNA, 33 bp, Homo sapiens
ggattacaggaaaatacaggacctatgccctgt

SEQ ID NO: 43422 - DNA, 33 bp, Homo sapiens
agaatatcacacatcaaaaggttgtcagcctag

SEQ ID NO: 43423 - DNA, 33 bp, Homo sapiens
ttttcccatgagagccaaacactgcatccaaaa

SEQ ID NO: 43424 - DNA, 33 bp, Homo sapiens
ctcctaaggaaaccaaactcacaatagtaatac

SEQ ID NO: 43425 - DNA, 33 bp, Homo sapiens
tgtgattcacatgacactatgatgtaagctttt

SEQ ID NO: 43426 - DNA, 33 bp, Homo sapiens
caactcatccagtaacacagatttttatctgga

SEQ ID NO: 43427 - DNA, 33 bp, Homo sapiens
ctgtctttggccaccacggattgcctgagcaaa

SEQ ID NO: 43428 - DNA, 33 bp, Homo sapiens
ttgcctgcattccttagcttcctgtttcaaggc

SEQ ID NO: 43429 - DNA, 33 bp, Homo sapiens
ctactgtgtcatcaaagcttagcaattagcctc

SEQ ID NO: 43430 - DNA, 33 bp, Homo sapiens
tatgactacttctcacactgagctcacatactc

SEQ ID NO: 43431 - DNA, 33 bp, Homo sapiens
acatttccatcttccaatgcttctattgatggc

SEQ ID NO: 43432 - DNA, 33 bp, Homo sapiens
agagattcggatgtaaagaattagagagcccct

SEQ ID NO: 43433 - DNA, 33 bp, Homo sapiens
tccaaacatttaggaaaggagttaaatgcagtc

SEQ ID NO: 43434 - DNA, 33 bp, Homo sapiens
gatgtgtaagttacaaaacaaaaatgcatcttt

SEQ ID NO: 43435 - DNA, 33 bp, Homo sapiens
ttactaaaattcacaacgtcagctaaaacatga

SEQ ID NO: 43436 - DNA, 33 bp, Homo sapiens
acaaaacagataaaaaccctagaaatgagacat

SEQ ID NO: 43437 - DNA, 33 bp, Homo sapiens
caatgtattgatcagcacaatgaaacataattt

SEQ ID NO: 43438 - DNA, 33 bp, Homo sapiens
gtggttagtccgtccaatctcggcactccactt

SEQ ID NO: 43439 - DNA, 33 bp, Homo sapiens
gttgtcctatagttaacaatgatcctcagacaa

SEQ ID NO: 43440 - DNA, 51 bp, Homo sapiens
ttcagagactaagtgtctccagtaccacaaggtgcatttggttcctttgaa

SEQ ID NO: 43441 - DNA, 33 bp, Homo sapiens
tcttcttctgagagaccgcatatgacccactga

SEQ ID NO: 43442 - DNA, 33 bp, Homo sapiens
agcactgaaacactcacccatggttggaagccc

SEQ ID NO: 43443 - DNA, 33 bp, Homo sapiens
tacaggcatatttcacagaatacatagtagaaa

SEQ ID NO: 43444 - DNA, 33 bp, Homo sapiens
tccataaagaaatccacagtggctgggtacagc

SEQ ID NO: 43445 - DNA, 33 bp, Homo sapiens
cacagtgaagatgtgacgtgttggtaagtaccc

SEQ ID NO: 43446 - DNA, 33 bp, Homo sapiens
ggatggctgccaagtcacaagcattttacaaca

SEQ ID NO: 43447 - DNA, 33 bp, Homo sapiens
ttagatttactgataacaacaagcctaaatact

SEQ ID NO: 43448 - DNA, 33 bp, Homo sapiens
ccccatgcttggaggaactcattgacattgtcg

SEQ ID NO: 43449 - DNA, 33 bp, Homo sapiens
gtccctgaggctggaacgggcttaatgtcgtgg

SEQ ID NO: 43450 - DNA, 33 bp, Homo sapiens
caatgttaactcacagaacagactataagacac

SEQ ID NO: 43451 - DNA, 33 bp, Homo sapiens
gcattcgtctttgctcaaacaatgccccatcaa

SEQ ID NO: 43452 - DNA, 33 bp, Homo sapiens
tgtttttaaatcagatcacaccctgaggttctg

SEQ ID NO: 43453 - DNA, 51 bp, Homo sapiens
atggataactgagaggcatacgcaaagtgcggcaatcagtttctagtacag

SEQ ID NO: 43454 - DNA, 33 bp, Homo sapiens
cctgggtctatgtgcacgccgctatgctcgggt

SEQ ID NO: 43455 - DNA, 33 bp, Homo sapiens
ccatcttctctgtcaaagttgactaagttaaca

SEQ ID NO: 43456 - DNA, 33 bp, Homo sapiens
ggcaaatgaaaaagagaaaaatcatcagggata

SEQ ID NO: 43457 - DNA, 33 bp, Homo sapiens
ctaacaaggaataataactggcctttgtttata

SEQ ID NO: 43458 - DNA, 33 bp, Homo sapiens
agtcaaaccctttttcactattaacatgatatt

SEQ ID NO: 43459 - DNA, 33 bp, Homo sapiens
cttttgcaaaaaatctaaagcaagaggcagaaa

SEQ ID NO: 43460 - DNA, 33 bp, Homo sapiens
gaggcactgctgtgtaagtggtattgttattac

SEQ ID NO: 43461 - DNA, 33 bp, Homo sapiens
ggtgcactgtgaaagccgaggaaatcaggagat

SEQ ID NO: 43462 - DNA, 33 bp, Homo sapiens
acactgacagtgagtcaatatctcagctgatat

SEQ ID NO: 43463 - DNA, 33 bp, Homo sapiens
tctctccttgagaggccatgcggcaacgtgctc

SEQ ID NO: 43464 - DNA, 33 bp, Homo sapiens
gttagttgcaattgtgacaagagaagggcatgg

SEQ ID NO: 43465 - DNA, 33 bp, Homo sapiens
ctttttagctgttaaggagggatgccaatcact

SEQ ID NO: 43466 - DNA, 33 bp, Homo sapiens
tagagcaaattgaacacagagaatagtgcaaaa

SEQ ID NO: 43467 - DNA, 33 bp, Homo sapiens
tcatcgggtcttcccaataacctctaaggtagt

SEQ ID NO: 43468 - DNA, 33 bp, Homo sapiens
tgaactggtcaggtaccgattcatctatgatat

SEQ ID NO: 43469 - DNA, 51 bp, Homo sapiens
ccactgtctttcaccagagatgaaagtaacaatgtactcaatgtcatctag

SEQ ID NO: 43470 - DNA, 33 bp, Homo sapiens
gggaactagataacctaagaacctgctggccac

SEQ ID NO: 43471 - DNA, 33 bp, Homo sapiens
cctgttcactccagtacctattctgttctcagg

SEQ ID NO: 43472 - DNA, 33 bp, Homo sapiens
gtcttgtggtctgcaacgcctaaggtccatgca

SEQ ID NO: 43473 - DNA, 33 bp, Homo sapiens
tacacttatattccacaaagagaacaactttta

SEQ ID NO: 43474 - DNA, 51 bp, Homo sapiens
tcagagccttcacatttatccgttacactacttcccaactcaatgtgctat

SEQ ID NO: 43475 - DNA, 33 bp, Homo sapiens
ttctccccagcccttcccatcgcagggaataat

SEQ ID NO: 43476 - DNA, 33 bp, Homo sapiens
tcttgttcattataggccaaaatggttaaaacc

SEQ ID NO: 43477 - DNA, 51 bp, Homo sapiens
ttggccagctctcttgagtgcctttaaagatttccggcttctctcatccgg

SEQ ID NO: 43478 - DNA, 33 bp, Homo sapiens
aatggttctactcttccactggagaaaacagaa

SEQ ID NO: 43479 - DNA, 33 bp, Homo sapiens
gcactacctggcatacaataggtacataataaa

SEQ ID NO: 43480 - DNA, 33 bp, Homo sapiens
ctttcctgctggaaacggacttgatacacagac

SEQ ID NO: 43481 - DNA, 51 bp, Homo sapiens
tcttccacactgaaggtacagatccggcacttgccaggccaggacactgaa

SEQ ID NO: 43482 - DNA, 33 bp, Homo sapiens
ggaggtcatattttgccatctgagctgaagagg

SEQ ID NO: 43483 - DNA, 33 bp, Homo sapiens
tcaggtaagacctgcgaaagaactgaaggaagc

SEQ ID NO: 43484 - DNA, 33 bp, Homo sapiens
cttcagcttatgagaccaaaatgctgccagctg

SEQ ID NO: 43485 - DNA, 33 bp, Homo sapiens
aagaatattcaaaagcacaattcaaccagacga

SEQ ID NO: 43486 - DNA, 33 bp, Homo sapiens
accttatcattattcaaaaggtagagttctgga

SEQ ID NO: 43487 - DNA, 33 bp, Homo sapiens
ggtagcatagtagataccattatggttattgtt

SEQ ID NO: 43488 - DNA, 33 bp, Homo sapiens
gttgtttttaaggagcaatttacaggcagaagg

SEQ ID NO: 43489 - DNA, 33 bp, Homo sapiens
tcttgatatgacattagtaatgctgccaagaaa

SEQ ID NO: 43490 - DNA, 33 bp, Homo sapiens
ttggattatgttttcactcaaagaccagcatat

SEQ ID NO: 43491 - DNA, 33 bp, Homo sapiens
gtgcagtgaccgcggactaagctatcaccccat

SEQ ID NO: 43492 - DNA, 33 bp, Homo sapiens
gtcactacctgatgaaagagtgagatttacttt

SEQ ID NO: 43493 - DNA, 33 bp, Homo sapiens
acagctgcaggtcagaaaatgcggggagaggac

SEQ ID NO: 43494 - DNA, 33 bp, Homo sapiens
ttctcaagatttaggaatcacctgacactaaac

SEQ ID NO: 43495 - DNA, 33 bp, Homo sapiens
ctgccacagctctgccacgggagaaaggccctg

SEQ ID NO: 43496 - DNA, 33 bp, Homo sapiens
ttgtcatcactttaccaggctgtcaggagcatc

SEQ ID NO: 43497 - DNA, 33 bp, Homo sapiens
tgtgtctgctatagagccaaatgacccaataag

SEQ ID NO: 43498 - DNA, 33 bp, Homo sapiens
ctgtaattggtaagaacttctgggtgggcaccc

SEQ ID NO: 43499 - DNA, 33 bp, Homo sapiens
agtgaaagaaaacaacaatggcttagacaagag

SEQ ID NO: 43500 - DNA, 33 bp, Homo sapiens
ctaggactggttaacaatggtaaagaaaatgca

SEQ ID NO: 43501 - DNA, 33 bp, Homo sapiens
gggttgtaggtacttacggcattgagagctctg

SEQ ID NO: 43502 - DNA, 33 bp, Homo sapiens
tcgctacggatccaggccattcctgggtgagcc

SEQ ID NO: 43503 - DNA, 33 bp, Homo sapiens
agattagcccctgaaacgttgtattattcaaag

SEQ ID NO: 43504 - DNA, 33 bp, Homo sapiens
aagatgaaccaagaaaataatctacctgctttt

SEQ ID NO: 43505 - DNA, 33 bp, Homo sapiens
ttaatttggcagaagcaagaagatcatttcagc

SEQ ID NO: 43506 - DNA, 33 bp, Homo sapiens
ggggataactcgagaccatgggagatgagaata

SEQ ID NO: 43507 - DNA, 33 bp, Homo sapiens
ggaaatacatttcataagatgatagctcccaaa

SEQ ID NO: 43508 - DNA, 33 bp, Homo sapiens
ggcactcaatgactcacggaataataaagtatc

SEQ ID NO: 43509 - DNA, 33 bp, Homo sapiens
ctaaccataatccttgaataaagaagaactgca

SEQ ID NO: 43510 - DNA, 51 bp, Homo sapiens
agtgggtgcttatagcaatactccaatgcaattcaaccatcatatgataag

SEQ ID NO: 43511 - DNA, 33 bp, Homo sapiens
ttaactcaggttttaacgttgaaagatagaatg

SEQ ID NO: 43512 - DNA, 33 bp, Homo sapiens
tagggtgaaattgtgaaataatgattagggatg

SEQ ID NO: 43513 - DNA, 33 bp, Homo sapiens
atgggggtttctattacagggcttctactcttg

SEQ ID NO: 43514 - DNA, 33 bp, Homo sapiens
ctcacacacaaatacccataccctgtttccacc

SEQ ID NO: 43515 - DNA, 51 bp, Homo sapiens
tgatgtgatcatatggtagattacactgatagattttaaaccagccctgca

SEQ ID NO: 43516 - DNA, 33 bp, Homo sapiens
actggcatgaaacaaaattgtgattagaattct

SEQ ID NO: 43517 - DNA, 33 bp, Homo sapiens
caacgttattagcagcagaaaaaaacatgtgtc

SEQ ID NO: 43518 - DNA, 33 bp, Homo sapiens
ctcttcatttccagataaattttagaagcagct

SEQ ID NO: 43519 - DNA, 33 bp, Homo sapiens
tgtatttagatattcacgttttctgacagaaac

SEQ ID NO: 43520 - DNA, 33 bp, Homo sapiens
tccttaagccctcataaagactccacaccctgg

SEQ ID NO: 43521 - DNA, 33 bp, Homo sapiens
tagattgagattatgcaacaccaatgtgtaaaa

SEQ ID NO: 43522 - DNA, 33 bp, Homo sapiens
attaaccactgatagaaacttaggttgattctg

SEQ ID NO: 43523 - DNA, 33 bp, Homo sapiens
gggatgcgcataatgacatagtgatgaattcaa

SEQ ID NO: 43524 - DNA, 33 bp, Homo sapiens
tataatcaggctataactagatatattccagaa

SEQ ID NO: 43525 - DNA, 33 bp, Homo sapiens
aagttcattccccacaatcacagcttctccagc

SEQ ID NO: 43526 - DNA, 33 bp, Homo sapiens
gtagaccgagggaacacaatagagaaaccagaa

SEQ ID NO: 43527 - DNA, 33 bp, Homo sapiens
ggttctcaagcttagcaacacaatcatatcatc

SEQ ID NO: 43528 - DNA, 33 bp, Homo sapiens
tattccggcttgtactcaattactagaacaact

SEQ ID NO: 43529 - DNA, 33 bp, Homo sapiens
attcattgcaatcacaatcaaaatgtcgtcagg

SEQ ID NO: 43530 - DNA, 33 bp, Homo sapiens
tgtgccaaacctttacacactttatattgcttt

SEQ ID NO: 43531 - DNA, 33 bp, Homo sapiens
aaaccagtcagatagacatggatgattagtgtc

SEQ ID NO: 43532 - DNA, 33 bp, Homo sapiens
tggaatctggaatggaaatgatgtgacccaatg

SEQ ID NO: 43533 - DNA, 33 bp, Homo sapiens
cagacctttcatattccccttcagccttcatca

SEQ ID NO: 43534 - DNA, 33 bp, Homo sapiens
tccaactattcaaacaaaactgagatgcttgta

SEQ ID NO: 43535 - DNA, 33 bp, Homo sapiens
taaatcagaaatctgcaaatagaagatgtgttt

SEQ ID NO: 43536 - DNA, 33 bp, Homo sapiens
ataatgttttgtacacaagctgagttctaaagc

SEQ ID NO: 43537 - DNA, 33 bp, Homo sapiens
tctcgagagcatgaaacggggagagactgtctc

SEQ ID NO: 43538 - DNA, 33 bp, Homo sapiens
ggcttggtttggaaaaaaatccatcacgagatg

SEQ ID NO: 43539 - DNA, 33 bp, Homo sapiens
ttctcactttcttgtcccgggagaatgaaattt

SEQ ID NO: 43540 - DNA, 33 bp, Homo sapiens
gatatatagtggtcataacaacactgtactcat

SEQ ID NO: 43541 - DNA, 33 bp, Homo sapiens
ttacagagctttttgaaaaattgcaatcctatg

SEQ ID NO: 43542 - DNA, 33 bp, Homo sapiens
ggtgctaaccaaaaccgccttttctctcttact

SEQ ID NO: 43543 - DNA, 33 bp, Homo sapiens
ttcctcaaggagtttacggtcaggtaactgcat

SEQ ID NO: 43544 - DNA, 33 bp, Homo sapiens
cttgaggccaagctaaacattgctactggcctt

SEQ ID NO: 43545 - DNA, 33 bp, Homo sapiens
aatgccctcaaagtaccgacagcaccatcttgc

SEQ ID NO: 43546 - DNA, 33 bp, Homo sapiens
tccactaggtgtaagaaacttttataagccaca

SEQ ID NO: 43547 - DNA, 33 bp, Homo sapiens
atctggaggttaggtcaatgcagctaggtctgc

SEQ ID NO: 43548 - DNA, 33 bp, Homo sapiens
attggagttggaagtccgaagatgggagagaag

SEQ ID NO: 43549 - DNA, 33 bp, Homo sapiens
agtccctgttccctgacgattttatgggctgta

SEQ ID NO: 43550 - DNA, 51 bp, Homo sapiens
aaaatattttgcattgtaaaagatcaaaaacataaaggcttacttgacaaa

SEQ ID NO: 43551 - DNA, 33 bp, Homo sapiens
tggtttccttggccacaagtgtgaatacgagac

SEQ ID NO: 43552 - DNA, 33 bp, Homo sapiens
tgaataatatgggaaactgacctagtttgaaaa

SEQ ID NO: 43553 - DNA, 33 bp, Homo sapiens
gtggtcacatcacatcaaatgtgcctcctcatg

SEQ ID NO: 43554 - DNA, 33 bp, Homo sapiens
tctactgtgatttaataatggactttaacatac

SEQ ID NO: 43555 - DNA, 33 bp, Homo sapiens
acaaaaagccaggaaccagggcaagtccatgga

SEQ ID NO: 43556 - DNA, 33 bp, Homo sapiens
gttttctgtttaaagcagaatgtttcgagagcc

SEQ ID NO: 43557 - DNA, 33 bp, Homo sapiens
gttgagaaggaggcaaaataatcagtcatcagg

SEQ ID NO: 43558 - DNA, 33 bp, Homo sapiens
tacatcgttgcagataactatagggggtgtgtc

SEQ ID NO: 43559 - DNA, 33 bp, Homo sapiens
cctgaatgtgcttgacaatgctcagagagtttt

SEQ ID NO: 43560 - DNA, 33 bp, Homo sapiens
tagctccccgcacatcaattcccttctgatgct

SEQ ID NO: 43561 - DNA, 33 bp, Homo sapiens
atcctatgcacaactcacatggaattccccaag

SEQ ID NO: 43562 - DNA, 51 bp, Homo sapiens
actgattgaggctccactgtgtgaacaactgtactttaacacacaatagag

SEQ ID NO: 43563 - DNA, 33 bp, Homo sapiens
gaaagagcaaggaaaccagcgtaactggactgg

SEQ ID NO: 43564 - DNA, 33 bp, Homo sapiens
aaataacacactgtaccgatgagttacaaatgt

SEQ ID NO: 43565 - DNA, 33 bp, Homo sapiens
tgcctctccatccttgaagcactactcaaccac

SEQ ID NO: 43566 - DNA, 51 bp, Homo sapiens
tctcagcagttttcctgagagtaccaccaaagtctcatcatatttgagagg

SEQ ID NO: 43567 - DNA, 51 bp, Homo sapiens
tgatagtccctgtttctttagtacgctccctgtctcactggtttggaggca

SEQ ID NO: 43568 - DNA, 33 bp, Homo sapiens
cctgatgtctcctttacgtgttcctcatccatt

SEQ ID NO: 43569 - DNA, 33 bp, Homo sapiens
aatttagtgtcttagcaatcggtacatgatggt

SEQ ID NO: 43570 - DNA, 33 bp, Homo sapiens
agtttgttagcagaacaagaagaaagttaaagt

SEQ ID NO: 43571 - DNA, 33 bp, Homo sapiens
ttatagacagctgtaaaacaaaagtcagaataa

SEQ ID NO: 43572 - DNA, 33 bp, Homo sapiens
ctctagaaaatagtcagcctgatatacgatctg

SEQ ID NO: 43573 - DNA, 33 bp, Homo sapiens
cattctcctcttccacagacagaattcgttctt

SEQ ID NO: 43574 - DNA, 33 bp, Homo sapiens
catggcctcttggagagcaggaacgtttttgtt

SEQ ID NO: 43575 - DNA, 51 bp, Homo sapiens
ccagaaatatttctgagaatttcacgaggacagacaaattaggactgtaaa

SEQ ID NO: 43576 - DNA, 33 bp, Homo sapiens
agggagcagagctaggaccagtgtacccagaat

SEQ ID NO: 43577 - DNA, 33 bp, Homo sapiens
ctcaaagcaggaccaagaaatatgacatgcctc

SEQ ID NO: 43578 - DNA, 33 bp, Homo sapiens
atggactctctctaagaaactcgctactctcca

SEQ ID NO: 43579 - DNA, 33 bp, Homo sapiens
tgccagctttacaagccacagaatcaccaaaac

SEQ ID NO: 43580 - DNA, 33 bp, Homo sapiens
cagaactgtgagacgacacattcctgttgctct

SEQ ID NO: 43581 - DNA, 33 bp, Homo sapiens
taggaggacacagctccacaatctgggatagga

SEQ ID NO: 43582 - DNA, 33 bp, Homo sapiens
attgtggttgcaattcacatttccctggtgacc

SEQ ID NO: 43583 - DNA, 33 bp, Homo sapiens
aataccagctgttaaacgtaatgagaaaatgta

SEQ ID NO: 43584 - DNA, 33 bp, Homo sapiens
ctggttgattttagaaatatagcaccctatctt

SEQ ID NO: 43585 - DNA, 33 bp, Homo sapiens
ttgccttcatcattcactctgagccagtgactg

SEQ ID NO: 43586 - DNA, 33 bp, Homo sapiens
cccaggacagagctgaagccatccagagaccct

SEQ ID NO: 43587 - DNA, 33 bp, Homo sapiens
gacaagcaatgcagacacaggcagaaggagaca

SEQ ID NO: 43588 - DNA, 33 bp, Homo sapiens
gtgttggcataaagcaaacactcaacaggttat

SEQ ID NO: 43589 - DNA, 33 bp, Homo sapiens
atattgctgcttcctaccctctgtgtctttcct

SEQ ID NO: 43590 - DNA, 33 bp, Homo sapiens
ctaattacatgacataaaataataatgctcaga

SEQ ID NO: 43591 - DNA, 33 bp, Homo sapiens
cattgggtcgtaaccacagtcagaggttttgtt

SEQ ID NO: 43592 - DNA, 33 bp, Homo sapiens
tccagtcctaagaacacggcacctctcagcctt

SEQ ID NO: 43593 - DNA, 33 bp, Homo sapiens
ctagaacctagaaaaaaagctcaccacagcaac

SEQ ID NO: 43594 - DNA, 33 bp, Homo sapiens
taaagcacacagactcaaagtaacttgcccagg

SEQ ID NO: 43595 - DNA, 33 bp, Homo sapiens
gactgaggttctaaagacggaaattcacatcag

SEQ ID NO: 43596 - DNA, 33 bp, Homo sapiens
taatccctgaaatctacgaatgtgttacgttac

SEQ ID NO: 43597 - DNA, 33 bp, Homo sapiens
atgaagagcttccccaatgaacacatggcgtgc

SEQ ID NO: 43598 - DNA, 33 bp, Homo sapiens
aagttgatagaaattcaatttggggaagctagg

SEQ ID NO: 43599 - DNA, 33 bp, Homo sapiens
gtaatggttgaatgtacctgtgaacaaatttta

SEQ ID NO: 43600 - DNA, 33 bp, Homo sapiens
cactgttaaaggttctcaccatcctggcatcca

SEQ ID NO: 43601 - DNA, 33 bp, Homo sapiens
gcatttcctttaaaaaccggagcactgactttg

SEQ ID NO: 43602 - DNA, 33 bp, Homo sapiens
taacttcccaaatcaacgactcccagtttaaca

SEQ ID NO: 43603 - DNA, 33 bp, Homo sapiens
gaagatgaagcaaggaagagtattaggaggtgg

SEQ ID NO: 43604 - DNA, 33 bp, Homo sapiens
ctattcaacattcactcaacacaaatctagcta

SEQ ID NO: 43605 - DNA, 33 bp, Homo sapiens
cctcttataactgagcaaataaggacaaaagct

SEQ ID NO: 43606 - DNA, 33 bp, Homo sapiens
tcagataaagagagaaagagaaatgtttaatcc

SEQ ID NO: 43607 - DNA, 33 bp, Homo sapiens
tcactggaggtcaaaaaggttcacaagaggcag

SEQ ID NO: 43608 - DNA, 33 bp, Homo sapiens
ttctagattgtctacagtggcctccaaaacatt

SEQ ID NO: 43609 - DNA, 33 bp, Homo sapiens
tcagcccctagattcacctcctatccgtgtaat

SEQ ID NO: 43610 - DNA, 33 bp, Homo sapiens
ctcagcaggattagtaccttttagatgcatgtg

SEQ ID NO: 43611 - DNA, 33 bp, Homo sapiens
agggaaaaaaaactccagcagacaaaactgtaa

SEQ ID NO: 43612 - DNA, 33 bp, Homo sapiens
atgaggggcagggatcaatttgtttcatttctc

SEQ ID NO: 43613 - DNA, 33 bp, Homo sapiens
tttgtttgcatcattacgtaaggattctatgac

SEQ ID NO: 43614 - DNA, 33 bp, Homo sapiens
acattcattcattcaacggctatcttttgagac

SEQ ID NO: 43615 - DNA, 33 bp, Homo sapiens
gatacaattcgttttcccagattttacctatta

SEQ ID NO: 43616 - DNA, 33 bp, Homo sapiens
cacaccacaactctcaacattgcacccatggct

SEQ ID NO: 43617 - DNA, 33 bp, Homo sapiens
aatcaaccacttcacaagatacgatagagacac

SEQ ID NO: 43618 - DNA, 33 bp, Homo sapiens
ttaaagataatggaagacaaagagaaatgtttg

SEQ ID NO: 43619 - DNA, 33 bp, Homo sapiens
aacatatttggaagacaagaaaatgaacccaga

SEQ ID NO: 43620 - DNA, 33 bp, Homo sapiens
ttcagactactactgacacaatcattttttgat

SEQ ID NO: 43621 - DNA, 33 bp, Homo sapiens
ttgaagctgaatgtgacatttgaactcaaatcc

SEQ ID NO: 43622 - DNA, 33 bp, Homo sapiens
gagtgtcatctttatcaaagtcaaaagtccagg

SEQ ID NO: 43623 - DNA, 33 bp, Homo sapiens
gccagagcaaatgaaacgacaaatgaaaaaccg

SEQ ID NO: 43624 - DNA, 33 bp, Homo sapiens
aggattcaaggaagaaatcagagtggctagaat

SEQ ID NO: 43625 - DNA, 33 bp, Homo sapiens
actgtagtataacgtgcaactcatttgctccgt

SEQ ID NO: 43626 - DNA, 33 bp, Homo sapiens
gcaggattcaacatgaagggaagtttgaatatt

SEQ ID NO: 43627 - DNA, 33 bp, Homo sapiens
cattcccatgctagaacgaaaaaatccaactcc

SEQ ID NO: 43628 - DNA, 33 bp, Homo sapiens
ttggtggaataaaagcacatgatcttgggacgc

SEQ ID NO: 43629 - DNA, 33 bp, Homo sapiens
acagagttctccacacagtgaatagctccgaga

SEQ ID NO: 43630 - DNA, 33 bp, Homo sapiens
taattatgaacaaaacacagtagaataaacaca

SEQ ID NO: 43631 - DNA, 33 bp, Homo sapiens
catgcatcccatcttcaaccaggcgccggcagg

SEQ ID NO: 43632 - DNA, 33 bp, Homo sapiens
ccacccgtctcaaacactccaaaacacgtgtcc

SEQ ID NO: 43633 - DNA, 33 bp, Homo sapiens
gcctggtacccagcagacaatcggcaaatgcct

SEQ ID NO: 43634 - DNA, 33 bp, Homo sapiens
aagagtccacaaactacagcctacaggtcaaat

SEQ ID NO: 43635 - DNA, 33 bp, Homo sapiens
atgtactggctttaaccgaggggatttcctgct

SEQ ID NO: 43636 - DNA, 33 bp, Homo sapiens
aaagaaaactctgaagaatacagaaagagccga

SEQ ID NO: 43637 - DNA, 33 bp, Homo sapiens
aaaaacagctcaaataagtcaaaggaggcccac

SEQ ID NO: 43638 - DNA, 33 bp, Homo sapiens
gatctcaaacaacctaatacctcagatgaacta

SEQ ID NO: 43639 - DNA, 33 bp, Homo sapiens
taacatttggggaaaacgattggctaatcaaaa

SEQ ID NO: 43640 - DNA, 33 bp, Homo sapiens
gactattttcctgaaaaaaaacaggcacacaac

SEQ ID NO: 43641 - DNA, 33 bp, Homo sapiens
tgaggccaaaaaataaaataggaagtgcttgga

SEQ ID NO: 43642 - DNA, 33 bp, Homo sapiens
aatacagtcactacaaatggtttacaaaactca

SEQ ID NO: 43643 - DNA, 33 bp, Homo sapiens
atatgcataaggattccatgctttgtctgtttt

SEQ ID NO: 43644 - DNA, 33 bp, Homo sapiens
gtcaagtcagtgtggagtcaactctatttttat

SEQ ID NO: 43645 - DNA, 33 bp, Homo sapiens
gcttgtgacagtaaacccagaacttgaggccag

SEQ ID NO: 43646 - DNA, 33 bp, Homo sapiens
tgttctgtgcaaaagcgcaacatgaacctatat

SEQ ID NO: 43647 - DNA, 33 bp, Homo sapiens
tagcatggtataaaaaattctctccaactatga

SEQ ID NO: 43648 - DNA, 33 bp, Homo sapiens
aatatcatgactatcactgaagcttggagtagc

SEQ ID NO: 43649 - DNA, 51 bp, Homo sapiens
ttcgtggggagaaagacatgtaatacggaaaacagaagggcacacaggagg

SEQ ID NO: 43650 - DNA, 33 bp, Homo sapiens
taatcataaagcagcacatttccaagctctgaa

SEQ ID NO: 43651 - DNA, 33 bp, Homo sapiens
ttctcttgcctacttccagtcccagagaatggg

SEQ ID NO: 43652 - DNA, 33 bp, Homo sapiens
tcttgaacactcaccaccgactgcaaatatgtc

SEQ ID NO: 43653 - DNA, 33 bp, Homo sapiens
tgccaaaaacatcaaaaaatagtagacttagga

SEQ ID NO: 43654 - DNA, 33 bp, Homo sapiens
aaatagatgttccagtgaaagaagctgttttat

SEQ ID NO: 43655 - DNA, 33 bp, Homo sapiens
aagtagaatgctaagaagttcgtaagtttttaa

SEQ ID NO: 43656 - DNA, 33 bp, Homo sapiens
tacaatggtctgaagacgacaaaaaaatgcttg

SEQ ID NO: 43657 - DNA, 33 bp, Homo sapiens
agtttggggtgcagtacctgttttggatgcttg

SEQ ID NO: 43658 - DNA, 33 bp, Homo sapiens
ttattagagttgtcgacgaaaaaaatctaactt

SEQ ID NO: 43659 - DNA, 33 bp, Homo sapiens
ttcattctcaagatcaacttttccttgtccctt

SEQ ID NO: 43660 - DNA, 33 bp, Homo sapiens
gtacgtgagttctagcaagatgccagagaatcc

SEQ ID NO: 43661 - DNA, 33 bp, Homo sapiens
agcagctaaatatgaaaagagagcagaagacac

SEQ ID NO: 43662 - DNA, 33 bp, Homo sapiens
tttaacctccttgctaataatcaatgtgattca

SEQ ID NO: 43663 - DNA, 33 bp, Homo sapiens
atgaatagaaaaatcaaactgctagaacctcca

SEQ ID NO: 43664 - DNA, 33 bp, Homo sapiens
aaacagtctaggtacactgaagaaaacacatct

SEQ ID NO: 43665 - DNA, 33 bp, Homo sapiens
ccaggaccaatggacaaaatctgcaaggaggca

SEQ ID NO: 43666 - DNA, 33 bp, Homo sapiens
gcaaggatgtttcctgaataatgtgcactgagc

SEQ ID NO: 43667 - DNA, 33 bp, Homo sapiens
tcctgttttcaagatgcagtggactctctttta

SEQ ID NO: 43668 - DNA, 51 bp, Homo sapiens
aaggtctatgttctgaaaggaataacaggatactttgttaagtgaatggtg

SEQ ID NO: 43669 - DNA, 33 bp, Homo sapiens
tcactatcttttggaacttactgtgacagagga

SEQ ID NO: 43670 - DNA, 33 bp, Homo sapiens
atctaagcatgaaggacaccctagaatttgcac

SEQ ID NO: 43671 - DNA, 33 bp, Homo sapiens
aacaaccagaagatcacgagctaaaccaataaa

SEQ ID NO: 43672 - DNA, 33 bp, Homo sapiens
aaaatcagaacatataactctaagggaaaaagg

SEQ ID NO: 43673 - DNA, 33 bp, Homo sapiens
cctagagaaacctgcaaacttgtgtctccacct

SEQ ID NO: 43674 - DNA, 33 bp, Homo sapiens
tatctcttgaccatgccattgattagttatgtg

SEQ ID NO: 43675 - DNA, 33 bp, Homo sapiens
ttgttgctgtatcccactccaactcatttgatc

SEQ ID NO: 43676 - DNA, 33 bp, Homo sapiens
gtcattatggatcttacataaacaagaaataaa

SEQ ID NO: 43677 - DNA, 33 bp, Homo sapiens
ttaggtgttatgatgccaatttgcccacacatt

SEQ ID NO: 43678 - DNA, 33 bp, Homo sapiens
gaaaagggggctgggacacgttggtgatttttt

SEQ ID NO: 43679 - DNA, 33 bp, Homo sapiens
atggagtcttccatccactggtaaaatctggaa

SEQ ID NO: 43680 - DNA, 33 bp, Homo sapiens
attttcaagaatcctcatacaaattgtccaggg

SEQ ID NO: 43681 - DNA, 33 bp, Homo sapiens
taatttcttcatcctaaaactctagctcctagc

SEQ ID NO: 43682 - DNA, 51 bp, Homo sapiens
tgtacattttaatccttattgccaaagtctcctaaaactgtgtatgaaaca

SEQ ID NO: 43683 - DNA, 33 bp, Homo sapiens
caggtcagccagttggaaacagagttgacggag

SEQ ID NO: 43684 - DNA, 33 bp, Homo sapiens
agaacgagagctcatacggcatccacgcgtgtc

SEQ ID NO: 43685 - DNA, 51 bp, Homo sapiens
aaatatcttccccacgatttctactcagcttcaaactctcagtgggtctat

SEQ ID NO: 43686 - DNA, 33 bp, Homo sapiens
tcagtgtggcccagataaacctgtcccttcttt

SEQ ID NO: 43687 - DNA, 33 bp, Homo sapiens
atagtgatcaccataactcaaggaaaatccaga

SEQ ID NO: 43688 - DNA, 33 bp, Homo sapiens
gacttcctctgccaccagaataaaggaatagag

SEQ ID NO: 43689 - DNA, 33 bp, Homo sapiens
cctcctcaattccataagcagagattcggagtg

SEQ ID NO: 43690 - DNA, 33 bp, Homo sapiens
gaagagaggaagggaacgttggaaccaatgctg

SEQ ID NO: 43691 - DNA, 33 bp, Homo sapiens
cactgcctggtcagtacaagaagcacttctctg

SEQ ID NO: 43692 - DNA, 33 bp, Homo sapiens
gaagataaaagagttaccagaactgagcagaga

SEQ ID NO: 43693 - DNA, 33 bp, Homo sapiens
agagtctgtgctttgcactttctggctttgtga

SEQ ID NO: 43694 - DNA, 33 bp, Homo sapiens
ttccaagcctaagacacgtgctgtttctatgct

SEQ ID NO: 43695 - DNA, 33 bp, Homo sapiens
tgggggttcgttacatcaagttgtggggtctgt

SEQ ID NO: 43696 - DNA, 33 bp, Homo sapiens
tcagcatcttttgttacacccgaagtgcattcc

SEQ ID NO: 43697 - DNA, 33 bp, Homo sapiens
actgtcctcattttcaagctgaagaaccaagct

SEQ ID NO: 43698 - DNA, 33 bp, Homo sapiens
tgagaatattttcaccacggaaattggcacatg

SEQ ID NO: 43699 - DNA, 33 bp, Homo sapiens
ttgttataggttgaataatgtcccgaagaatat

SEQ ID NO: 43700 - DNA, 33 bp, Homo sapiens
gatgctgttcctctcaagtgggaaaaatttggt

SEQ ID NO: 43701 - DNA, 51 bp, Homo sapiens
gtagtgtatattataatacatagtcaccaatatgccaattggctcgcagac

SEQ ID NO: 43702 - DNA, 51 bp, Homo sapiens
ctgcccagttcatccagtccatacccatgtttcctttagggctcatcctgc

SEQ ID NO: 43703 - DNA, 33 bp, Homo sapiens
atagaatgcaaactttaaaaaagacataccttt

SEQ ID NO: 43704 - DNA, 33 bp, Homo sapiens
gggagaaggtaagtcacggaggattcgagccag

SEQ ID NO: 43705 - DNA, 33 bp, Homo sapiens
atcaacattttatagaaaggaaccagtggcttc

SEQ ID NO: 43706 - DNA, 33 bp, Homo sapiens
gaatagattttcagaaaagagaaacgcagatga

SEQ ID NO: 43707 - DNA, 33 bp, Homo sapiens
acaatgccactgaacaactttcattgtctatgt

SEQ ID NO: 43708 - DNA, 33 bp, Homo sapiens
ccccaaaggatttgaaacttcccaggcatgggg

SEQ ID NO: 43709 - DNA, 33 bp, Homo sapiens
gggaccaaagactatgaaaagtgaacctggctg

SEQ ID NO: 43710 - DNA, 33 bp, Homo sapiens
atttgggggtgatgacagaacattttaattcac

SEQ ID NO: 43711 - DNA, 33 bp, Homo sapiens
tggtctctcatgtgtcaacatttaccaagcctt

SEQ ID NO: 43712 - DNA, 33 bp, Homo sapiens
tcccctctacacctgaaagtctggaaaattctg

SEQ ID NO: 43713 - DNA, 33 bp, Homo sapiens
catcctgtaggccaaacgtagtgggttcaaatc

SEQ ID NO: 43714 - DNA, 33 bp, Homo sapiens
agaatagcattgatgtcaatgaagaactaggaa

SEQ ID NO: 43715 - DNA, 33 bp, Homo sapiens
gtgtttttgctgaaagacttgttagtttccttc

SEQ ID NO: 43716 - DNA, 33 bp, Homo sapiens
gcaaattcaagagaaacgtaatgatgggctaca

SEQ ID NO: 43717 - DNA, 33 bp, Homo sapiens
gtacatgatttattgacgatgtgcgttcagtag

SEQ ID NO: 43718 - DNA, 33 bp, Homo sapiens
tctttgggttctaacacctttggtacatgtgaa

SEQ ID NO: 43719 - DNA, 33 bp, Homo sapiens
tataattaaaccccacaatacgtaagagataaa

SEQ ID NO: 43720 - DNA, 33 bp, Homo sapiens
ggacttaattatcaaaagaagcgaggtgagcat

SEQ ID NO: 43721 - DNA, 33 bp, Homo sapiens
acagaggatgaccatacgaagaggcagcaaggg

SEQ ID NO: 43722 - DNA, 33 bp, Homo sapiens
tagttagtccaattgtcaagtggcaaaaattag

SEQ ID NO: 43723 - DNA, 33 bp, Homo sapiens
atagtcagtacctcaacgtcacagagccagccg

SEQ ID NO: 43724 - DNA, 33 bp, Homo sapiens
accataaggaaacggaatacaaagaggcaaatt

SEQ ID NO: 43725 - DNA, 33 bp, Homo sapiens
atttggctaatgagaaaacagatacttaaagag

SEQ ID NO: 43726 - DNA, 51 bp, Homo sapiens
tagctttgtagttctgcacccaaaaccattctcctcaggcgataaaatact

SEQ ID NO: 43727 - DNA, 51 bp, Homo sapiens
ggcctttaccacaaaatttgcattcacgacaatcactttaggcatgtctct

SEQ ID NO: 43728 - DNA, 33 bp, Homo sapiens
tctccctttcttcaaacactgcaaatccactaa

SEQ ID NO: 43729 - DNA, 33 bp, Homo sapiens
gatggccccatgtgataaagaaccatgcaacag

SEQ ID NO: 43730 - DNA, 33 bp, Homo sapiens
gctgcccagagtaagaataggtgtagcactgtg

SEQ ID NO: 43731 - DNA, 33 bp, Homo sapiens
tgtggctcattttaccaagaacacagaagagag

SEQ ID NO: 43732 - DNA, 33 bp, Homo sapiens
catacaagagctggacaagatgactcacaccta

SEQ ID NO: 43733 - DNA, 33 bp, Homo sapiens
cagagctgtcaagggccagaagaatataattaa

SEQ ID NO: 43734 - DNA, 33 bp, Homo sapiens
ctggctgagaagcagaaaaatgaaaaaacattt

SEQ ID NO: 43735 - DNA, 33 bp, Homo sapiens
ctgcggctgcccctaaaaggacagattgttgct

SEQ ID NO: 43736 - DNA, 33 bp, Homo sapiens
ataacaccttcaattaaacagaaaccaggacaa

SEQ ID NO: 43737 - DNA, 33 bp, Homo sapiens
gtatacatagaattcacccattgtatgcagcat

SEQ ID NO: 43738 - DNA, 33 bp, Homo sapiens
cagtccaggctacaaaaagtagaagaattgccc

SEQ ID NO: 43739 - DNA, 33 bp, Homo sapiens
cgttcctagccttgacgctgtaacagatttctt

SEQ ID NO: 43740 - DNA, 33 bp, Homo sapiens
ataatacgacaacttaagagaaactatttactt

SEQ ID NO: 43741 - DNA, 33 bp, Homo sapiens
tgtatgcataagtagaagtgtctatctctgtat

SEQ ID NO: 43742 - DNA, 33 bp, Homo sapiens
atttgatgagctctctcaaggcaagaagcccaa

SEQ ID NO: 43743 - DNA, 33 bp, Homo sapiens
tagggattttcttgaaactaccattaaagctac

SEQ ID NO: 43744 - DNA, 33 bp, Homo sapiens
aattaaagaaagtcaaagcgagaccagcatata

SEQ ID NO: 43745 - DNA, 33 bp, Homo sapiens
gatagtcactatactacccacaacagcaatgcc

SEQ ID NO: 43746 - DNA, 33 bp, Homo sapiens
tgaaatattttgtgtcagaaaccatgctaggca

SEQ ID NO: 43747 - DNA, 33 bp, Homo sapiens
gtctgcacaccctggacgtttctgaggctcctc

SEQ ID NO: 43748 - DNA, 33 bp, Homo sapiens
gcttttcagagtgttcaaggatcagggagcatg

SEQ ID NO: 43749 - DNA, 33 bp, Homo sapiens
ctgttgtaattgtcacccatcttgacaaggtgg

SEQ ID NO: 43750 - DNA, 33 bp, Homo sapiens
tgaccaatatatggcaaatgagagttctttggg

SEQ ID NO: 43751 - DNA, 33 bp, Homo sapiens
taaatagggaactggaaagatgctcaggaagag

SEQ ID NO: 43752 - DNA, 51 bp, Homo sapiens
ccagggtctttgcacaggattttccacacacagtacaagtctgggtctcgg

SEQ ID NO: 43753 - DNA, 33 bp, Homo sapiens
ccccacgagccaaaagcagtggatctagagtga

SEQ ID NO: 43754 - DNA, 33 bp, Homo sapiens
ctcattgaacaagcaactccatttagttccgtg

SEQ ID NO: 43755 - DNA, 33 bp, Homo sapiens
acttctgcattctggccgacagggatgtcaacg

SEQ ID NO: 43756 - DNA, 33 bp, Homo sapiens
cactttggttcctagaggcattcctactagttt

SEQ ID NO: 43757 - DNA, 33 bp, Homo sapiens
gtgaatgtgcatccccccaaagacaggcagtaa

SEQ ID NO: 43758 - DNA, 33 bp, Homo sapiens
tctcagcaaagcgagaaagggtcctgcttgcag

SEQ ID NO: 43759 - DNA, 33 bp, Homo sapiens
ctctcatctcggggaaacttttagagttgttgt

SEQ ID NO: 43760 - DNA, 33 bp, Homo sapiens
tcttattccaaggaaaagagtggaagatgaaaa

SEQ ID NO: 43761 - DNA, 33 bp, Homo sapiens
tacttctgagtgtttacagtttcagtgattctg

SEQ ID NO: 43762 - DNA, 33 bp, Homo sapiens
acgtcaatgcatagaacggcctccacagcaaag

SEQ ID NO: 43763 - DNA, 33 bp, Homo sapiens
tagatacagtaaaaaaactagtggctcatgcct

SEQ ID NO: 43764 - DNA, 33 bp, Homo sapiens
tgataagggtgtcagaaaatgggtctccctccc

SEQ ID NO: 43765 - DNA, 51 bp, Homo sapiens
acaaaacctcaagaattattaagaaagttctgctgtagtgtccctggtctt

SEQ ID NO: 43766 - DNA, 33 bp, Homo sapiens
caacagggagtcatgcaaggttgtagagaagtg

SEQ ID NO: 43767 - DNA, 33 bp, Homo sapiens
aggagcactggatgagcagttgtttgaggtaag

SEQ ID NO: 43768 - DNA, 33 bp, Homo sapiens
acaaacttgcgttgaaacaaagtgacccttaag

SEQ ID NO: 43769 - DNA, 33 bp, Homo sapiens
tttggttttacccttgaatgtttttctggcaac

SEQ ID NO: 43770 - DNA, 33 bp, Homo sapiens
aatgtgcaagaaaggacccaacaaggcagcttt

SEQ ID NO: 43771 - DNA, 33 bp, Homo sapiens
actcgagggctctacaaccatttgccgggcggg

SEQ ID NO: 43772 - DNA, 33 bp, Homo sapiens
agccttgcaaaggagacgatagtgagactgaag

SEQ ID NO: 43773 - DNA, 33 bp, Homo sapiens
gaagtgtccccactgtaaaactagaaaaatcta

SEQ ID NO: 43774 - DNA, 51 bp, Homo sapiens
tacagccaccaagaaaaataagccacgttatgtaaaaagagaagttgtaga

SEQ ID NO: 43775 - DNA, 51 bp, Homo sapiens
attctgccggggtttcttgagtcaccgagcatatggggcttcaggttggac

SEQ ID NO: 43776 - DNA, 51 bp, Homo sapiens
ccataaacccacacttccttctacacgtgagcttttattaattccagaatt

SEQ ID NO: 43777 - DNA, 33 bp, Homo sapiens
gtggagttctgtggagcacaggcctagtttgag

SEQ ID NO: 43778 - DNA, 51 bp, Homo sapiens
aatgcatctgggaaggctagcattgcgtctgacatgtaacagcccctgcaa

SEQ ID NO: 43779 - DNA, 33 bp, Homo sapiens
tggcacaacattgtgaatacttaaagccactgg

SEQ ID NO: 43780 - DNA, 33 bp, Homo sapiens
taactttataagctacagatgttaaatggtgag

SEQ ID NO: 43781 - DNA, 33 bp, Homo sapiens
tggagtgagattgtgaaacttggagcttgtgca

SEQ ID NO: 43782 - DNA, 33 bp, Homo sapiens
ctgccatgatcataaaagaccagttcccaggat

SEQ ID NO: 43783 - DNA, 33 bp, Homo sapiens
agtggttattttatgagaatagtgacaagcctt

SEQ ID NO: 43784 - DNA, 33 bp, Homo sapiens
tgtgcagaactgtgtgcattttttctagggaga

SEQ ID NO: 43785 - DNA, 51 bp, Homo sapiens
ggaggttcccatatattctccagccgctcctgtagttatgctggggccaca

SEQ ID NO: 43786 - DNA, 33 bp, Homo sapiens
aaagtgaaaagtgcaccgtatttcaagtctgaa

SEQ ID NO: 43787 - DNA, 51 bp, Homo sapiens
ttgggagtggatgtgagcatagaagaaaactcaggaatggggttaggttca

SEQ ID NO: 43788 - DNA, 33 bp, Homo sapiens
actcgggcttagaccccagttctgcgacttagc

SEQ ID NO: 43789 - DNA, 51 bp, Homo sapiens
tgtccttttacattcttgctaataccggttaattaagcagaaagcaatggt

SEQ ID NO: 43790 - DNA, 33 bp, Homo sapiens
gcctaaggtatctacaatctggtccttcacaga

SEQ ID NO: 43791 - DNA, 33 bp, Homo sapiens
gctctgacactgagaacgggcacttccctgctc

SEQ ID NO: 43792 - DNA, 33 bp, Homo sapiens
agaggagacagcagaaaaagccgcaggacagag

SEQ ID NO: 43793 - DNA, 33 bp, Homo sapiens
cacctcaagcacgtaacggaaatggaatcacac

SEQ ID NO: 43794 - DNA, 33 bp, Homo sapiens
gcagcagaagagccaacgtgcatggggattcca

SEQ ID NO: 43795 - DNA, 33 bp, Homo sapiens
ccaaatttagagcaagcccctttgatagtgtat

SEQ ID NO: 43796 - DNA, 33 bp, Homo sapiens
tgtgctgccgtgacagactccattcttcaggga

SEQ ID NO: 43797 - DNA, 33 bp, Homo sapiens
ccaccaggatggctaaaacataaacgactgaaa

SEQ ID NO: 43798 - DNA, 33 bp, Homo sapiens
attaattaccaggtcaaatcacttggagagaga

SEQ ID NO: 43799 - DNA, 33 bp, Homo sapiens
gctgcctaaattcacaagaaagagccctgacaa

SEQ ID NO: 43800 - DNA, 33 bp, Homo sapiens
gcagcaagatgactgacggagcccagacaaaat

SEQ ID NO: 43801 - DNA, 33 bp, Homo sapiens
taccataaaacccgtgaaataacagcagaggca

SEQ ID NO: 43802 - DNA, 33 bp, Homo sapiens
ttgtctttatttgtagaaagtccagtattgcat

SEQ ID NO: 43803 - DNA, 51 bp, Homo sapiens
taatagagccatcgatgaaaaaaatcataaactcattgtgagatgtaatca

SEQ ID NO: 43804 - DNA, 33 bp, Homo sapiens
cggcaggctgcttaggaatctcgggacttaagg

SEQ ID NO: 43805 - DNA, 33 bp, Homo sapiens
ctgagacaatgtcctccctgttgctacctctat

SEQ ID NO: 43806 - DNA, 33 bp, Homo sapiens
cattgcccctagagtcaaacagaatctgttcat

SEQ ID NO: 43807 - DNA, 33 bp, Homo sapiens
atgaggggaatgagacaagccagacttggacct

SEQ ID NO: 43808 - DNA, 33 bp, Homo sapiens
taagctcttgaaaggacaagaaaaggaatttgt

SEQ ID NO: 43809 - DNA, 33 bp, Homo sapiens
cacttccacatttccactctaacggcccctgcg

SEQ ID NO: 43810 - DNA, 33 bp, Homo sapiens
tgaaccagtgagttggaaaacactctatgaaag

SEQ ID NO: 43811 - DNA, 33 bp, Homo sapiens
gataaatacttcaaaagggtgttccaggacaag

SEQ ID NO: 43812 - DNA, 33 bp, Homo sapiens
ccaaagaaatcaaaacaaaggaggaagtcaaga

SEQ ID NO: 43813 - DNA, 33 bp, Homo sapiens
aaagactcaagagtggaaacgttaagaaaaagc

SEQ ID NO: 43814 - DNA, 33 bp, Homo sapiens
gggtatgggagacagaaatccaatcacttccct

SEQ ID NO: 43815 - DNA, 33 bp, Homo sapiens
caacccaccacacttacgtttctcttcttctag

SEQ ID NO: 43816 - DNA, 33 bp, Homo sapiens
cctcaaatgtaaactaaggatggcatccctcct

SEQ ID NO: 43817 - DNA, 33 bp, Homo sapiens
tggttccaaagaagaagcgtggttgtgagttgc

SEQ ID NO: 43818 - DNA, 33 bp, Homo sapiens
agacgcgcttggaataagtcattccctcaggcc

SEQ ID NO: 43819 - DNA, 33 bp, Homo sapiens
tggcttgtcatgggaaaatcacatgtaaccacc

SEQ ID NO: 43820 - DNA, 33 bp, Homo sapiens
aagccagaagagcacaatgagttgggagcttct

SEQ ID NO: 43821 - DNA, 51 bp, Homo sapiens
aaacaaggttgtttttgtctttatcgtttgttagagttatagatttatgat

SEQ ID NO: 43822 - DNA, 33 bp, Homo sapiens
actgagttccagtgaaattcaccgcaacaggca

SEQ ID NO: 43823 - DNA, 51 bp, Homo sapiens
ctctatttgctattgataaaagcaacgtaactgaaattactctgtacctca

SEQ ID NO: 43824 - DNA, 51 bp, Homo sapiens
ctttttcttcgcacaaaagccctggcagttagctcaccaacccctaggcct

SEQ ID NO: 43825 - DNA, 51 bp, Homo sapiens
gcgaagaaaaaggtgttcctacaagacagctcacagcttggactttagccc

SEQ ID NO: 43826 - DNA, 33 bp, Homo sapiens
taaatgtctgggttgacggtgcaacagttgact

SEQ ID NO: 43827 - DNA, 33 bp, Homo sapiens
ctgtctagccatggaactagttcgcactgaaac

SEQ ID NO: 43828 - DNA, 51 bp, Homo sapiens
tgtaaatggaaaaatgagaacaacgaccctattacaaagaaagcccagggt

SEQ ID NO: 43829 - DNA, 33 bp, Homo sapiens
gcgtatccgagaaccacaagcgtctcccctacc

SEQ ID NO: 43830 - DNA, 33 bp, Homo sapiens
gacctactatctatctcacagcacaatagggta

SEQ ID NO: 43831 - DNA, 33 bp, Homo sapiens
aggtcagatgtgacgacagcaggcccatcaagg

SEQ ID NO: 43832 - DNA, 33 bp, Homo sapiens
tcttacataacaaccacagttaccaaaatcgag

SEQ ID NO: 43833 - DNA, 33 bp, Homo sapiens
tgaaaagcagtagaagaaacagtcagagatgcc

SEQ ID NO: 43834 - DNA, 33 bp, Homo sapiens
ctgattcttaaatgtacgcggaaatgcaaaaac

SEQ ID NO: 43835 - DNA, 33 bp, Homo sapiens
tagttctactcaattaagatgagcaaaaggctg

SEQ ID NO: 43836 - DNA, 33 bp, Homo sapiens
ggattaaatgagatgacccatacaaaggcagtc

SEQ ID NO: 43837 - DNA, 33 bp, Homo sapiens
cctcattttgcaaaaaactatgtaagggaagtt

SEQ ID NO: 43838 - DNA, 33 bp, Homo sapiens
tgtgtgttatcttctaagccagtttttctgatt

SEQ ID NO: 43839 - DNA, 33 bp, Homo sapiens
tacgggaaagagacctcagatcaattggatgcc

SEQ ID NO: 43840 - DNA, 33 bp, Homo sapiens
aggatcctgagaacacaaggcaaatctcaaagc

SEQ ID NO: 43841 - DNA, 33 bp, Homo sapiens
tgggaatttatttgctcaagtcagtcattgaaa

SEQ ID NO: 43842 - DNA, 33 bp, Homo sapiens
cctctggctaagtgaaatgttacaggtggactt

SEQ ID NO: 43843 - DNA, 33 bp, Homo sapiens
ctgattgttgctttcacgtaaacagatgtcctt

SEQ ID NO: 43844 - DNA, 33 bp, Homo sapiens
caaggatagcttcagcagactcctggaaacaag

SEQ ID NO: 43845 - DNA, 33 bp, Homo sapiens
gtccctgattcaaaaaatgttaagcaccactca

SEQ ID NO: 43846 - DNA, 33 bp, Homo sapiens
gttatctctggaatgcaagtttaagcatgaaag

SEQ ID NO: 43847 - DNA, 33 bp, Homo sapiens
cctcactttaccttccccaatgacatcaggtct

SEQ ID NO: 43848 - DNA, 33 bp, Homo sapiens
attgacaaatgataccagaaaaaatgactaaaa

SEQ ID NO: 43849 - DNA, 33 bp, Homo sapiens
atttgaggttggagagacacgtctgagccagat

SEQ ID NO: 43850 - DNA, 33 bp, Homo sapiens
tttaataggttggttcacttcagaactaacttg

SEQ ID NO: 43851 - DNA, 33 bp, Homo sapiens
tttatattatgtgctacgtattgtcttaaataa

SEQ ID NO: 43852 - DNA, 33 bp, Homo sapiens
aaatgcacacttaaaaatatttccagccatatt

SEQ ID NO: 43853 - DNA, 33 bp, Homo sapiens
taagctaacagacataacattaaggagctaata

SEQ ID NO: 43854 - DNA, 33 bp, Homo sapiens
gaaaagaaaaaaattccatccctgagtctgtca

SEQ ID NO: 43855 - DNA, 33 bp, Homo sapiens
ctcgtcttgcagggacagaactcatcttcctcc

SEQ ID NO: 43856 - DNA, 33 bp, Homo sapiens
tattttattgtagtacaactttgctcgaagctg

SEQ ID NO: 43857 - DNA, 33 bp, Homo sapiens
aacagatgtgtttccactgacggcaatcaggtt

SEQ ID NO: 43858 - DNA, 33 bp, Homo sapiens
atggggtaaatgaacaagaagaggatgtagaag

SEQ ID NO: 43859 - DNA, 51 bp, Homo sapiens
tgcattgggtgtgctttcgaaattacaaagcagatcacgtagcgtccctgt

SEQ ID NO: 43860 - DNA, 33 bp, Homo sapiens
aagtcaatgagaataacggaggctgccccattc

SEQ ID NO: 43861 - DNA, 33 bp, Homo sapiens
gaggaagtattctagcacaacaaaaaatgaatt

SEQ ID NO: 43862 - DNA, 33 bp, Homo sapiens
ggtcagtgatggtgcacagagagctcatgactt

SEQ ID NO: 43863 - DNA, 33 bp, Homo sapiens
gagatttagacaactgacagagaatctgggact

SEQ ID NO: 43864 - DNA, 33 bp, Homo sapiens
ctctccctggctgggcaaacgtgtggaagttga

SEQ ID NO: 43865 - DNA, 33 bp, Homo sapiens
ggagaattacctcaaccgtctcttgaccatgtc

SEQ ID NO: 43866 - DNA, 33 bp, Homo sapiens
ataagcatggtgggttaaacatggaggcccatt

SEQ ID NO: 43867 - DNA, 33 bp, Homo sapiens
acaatcacagggcgtgcaaacctaaagtcaagg

SEQ ID NO: 43868 - DNA, 33 bp, Homo sapiens
catgggagagcaccacagattctgcaaagtggt

SEQ ID NO: 43869 - DNA, 33 bp, Homo sapiens
gccaagcctctccaaaatctccggagctcttcc

SEQ ID NO: 43870 - DNA, 51 bp, Homo sapiens
aatgaaaatcccagaggtatgcaggcttcaggcacagtttgatccagtagt

SEQ ID NO: 43871 - DNA, 33 bp, Homo sapiens
ctgcacactcatatgcacacacacatattggac

SEQ ID NO: 43872 - DNA, 33 bp, Homo sapiens
tccagccctgctgacaaattggtctttggtgaa

SEQ ID NO: 43873 - DNA, 33 bp, Homo sapiens
gaaattgcctgagtaactgctgacttgctgaac

SEQ ID NO: 43874 - DNA, 33 bp, Homo sapiens
ggagtggaaagtgtaacagagggatgtctggtc

SEQ ID NO: 43875 - DNA, 33 bp, Homo sapiens
gcccagaggacacataccattttcttctgttcc

SEQ ID NO: 43876 - DNA, 33 bp, Homo sapiens
ggctagatagtgaccaacagcgtgaatgaagcc

SEQ ID NO: 43877 - DNA, 33 bp, Homo sapiens
catgaccttacaaaaaagattagagtaggtgag

SEQ ID NO: 43878 - DNA, 51 bp, Homo sapiens
tggtggaatgaattcggtggcctaaatgtaccttcctcaaatgccacggct

SEQ ID NO: 43879 - DNA, 33 bp, Homo sapiens
gcgtaatcctattcccagacagaattacaagtg

SEQ ID NO: 43880 - DNA, 33 bp, Homo sapiens
atagaaccagcttctaagttcaggaaggaaacc

SEQ ID NO: 43881 - DNA, 33 bp, Homo sapiens
gcagaggaagcttctacgcgctagagaggatca

SEQ ID NO: 43882 - DNA, 33 bp, Homo sapiens
caactcggggaaaccagcaaggagtggggatat

SEQ ID NO: 43883 - DNA, 33 bp, Homo sapiens
gcagtattgatgaagacagtatgggatctgtga

SEQ ID NO: 43884 - DNA, 33 bp, Homo sapiens
gagggaatggtaaagacgccagagctcctcagc

SEQ ID NO: 43885 - DNA, 33 bp, Homo sapiens
tggtgcagctgcgctacggcgaagacggcctgg

SEQ ID NO: 43886 - DNA, 33 bp, Homo sapiens
gaaggatgctgaaaggcaagctctagtgcaaga

SEQ ID NO: 43887 - DNA, 33 bp, Homo sapiens
ccaaaaatagaaaaatgaagtgtggtgctacat

SEQ ID NO: 43888 - DNA, 33 bp, Homo sapiens
gccctccacatagtcacgtcagggagctttagg

SEQ ID NO: 43889 - DNA, 33 bp, Homo sapiens
aatactgttaagaacaaaacagagagaccactg

SEQ ID NO: 43890 - DNA, 33 bp, Homo sapiens
cactcctgtcgaagcccacgtgtatcatcacca

SEQ ID NO: 43891 - DNA, 33 bp, Homo sapiens
gtccctgcgcttaaccactaatctctgctgctc

SEQ ID NO: 43892 - DNA, 51 bp, Homo sapiens
tcttgtcttactgcattggatagaacgtcaaagtaatggtatatataataa

SEQ ID NO: 43893 - DNA, 33 bp, Homo sapiens
actgttggctcacagaaagagtggagttctgag

SEQ ID NO: 43894 - DNA, 33 bp, Homo sapiens
ttaactctgtacgagaacaagagcttactatga

SEQ ID NO: 43895 - DNA, 33 bp, Homo sapiens
gtagcctcagggaacccagattaaaggggagag

SEQ ID NO: 43896 - DNA, 33 bp, Homo sapiens
gatacccaccgagctacatctcccaatgtcagt

SEQ ID NO: 43897 - DNA, 33 bp, Homo sapiens
aaccatcgcagtatgaagctcatcattccaaac

SEQ ID NO: 43898 - DNA, 33 bp, Homo sapiens
tcattttacttgcacacagaggaccttagtctt

SEQ ID NO: 43899 - DNA, 51 bp, Homo sapiens
gagaactgtgtgcctggctgcgcataagattgtgggattatcaagaaaagt

SEQ ID NO: 43900 - DNA, 33 bp, Homo sapiens
ctgactctgcaccataaatgtcaaacaccaggt

SEQ ID NO: 43901 - DNA, 33 bp, Homo sapiens
tacctcaataaatgcccagatatcttcttaaag

SEQ ID NO: 43902 - DNA, 33 bp, Homo sapiens
ggcatgtagatggacaatataggcagtgcagtg

SEQ ID NO: 43903 - DNA, 33 bp, Homo sapiens
atttgaacatctacggccaaacctcaatccttc

SEQ ID NO: 43904 - DNA, 33 bp, Homo sapiens
tccatatagtcatccaactctttctgatatgaa

SEQ ID NO: 43905 - DNA, 51 bp, Homo sapiens
gactttgtgttctgtggattccctacattgctaacctctcccttaccacct

SEQ ID NO: 43906 - DNA, 51 bp, Homo sapiens
ctgaatccgtatcttctctatcctcactaccactggttttgccttcttttg

SEQ ID NO: 43907 - DNA, 51 bp, Homo sapiens
aaagtaagtaacagcatgagaatgacgtgccattaaatactactattggac

SEQ ID NO: 43908 - DNA, 33 bp, Homo sapiens
atgctgtttggataaaccatcatccaagtttga

SEQ ID NO: 43909 - DNA, 33 bp, Homo sapiens
aaatggctggctattcactatattttgcagaac

SEQ ID NO: 43910 - DNA, 33 bp, Homo sapiens
agatgtatgccacatcaaagtgtcttgcttaca

SEQ ID NO: 43911 - DNA, 33 bp, Homo sapiens
cttatcgtcagacaccacattatggaaatctac

SEQ ID NO: 43912 - DNA, 33 bp, Homo sapiens
cttgacacatacggggcagagctatttcatcac

SEQ ID NO: 43913 - DNA, 33 bp, Homo sapiens
aggaggcgcattttcacattctacttcatggtt

SEQ ID NO: 43914 - DNA, 51 bp, Homo sapiens
catgagattacaatatttcttgtaaaagttcttaatgttatgttcaaagga

SEQ ID NO: 43915 - DNA, 33 bp, Homo sapiens
aatgagcttaaaacaacgtcaagtctctaataa

SEQ ID NO: 43916 - DNA, 51 bp, Homo sapiens
cagtatacaacaagcagaagtttgcccttgaaaaactgtagtgtagttagt

SEQ ID NO: 43917 - DNA, 33 bp, Homo sapiens
tcctttaactcacacaacaaagcggtaagtgat

SEQ ID NO: 43918 - DNA, 33 bp, Homo sapiens
ctttgaattgttggaaagattttgtttctggct

SEQ ID NO: 43919 - DNA, 33 bp, Homo sapiens
atggaaagccttaaatcacttctcaaataaaaa

SEQ ID NO: 43920 - DNA, 33 bp, Homo sapiens
ttgaaacctgtggcagaatgtgttaggaccgtt

SEQ ID NO: 43921 - DNA, 33 bp, Homo sapiens
gggcattttgctgcgcactgagtgaatagttct

SEQ ID NO: 43922 - DNA, 33 bp, Homo sapiens
ctagagatgaggacaacttacatgctccctctc

SEQ ID NO: 43923 - DNA, 33 bp, Homo sapiens
atcattttttactacccatttggcatgatttat

SEQ ID NO: 43924 - DNA, 33 bp, Homo sapiens
aactgccctaacgggccgccagaatccccagac

SEQ ID NO: 43925 - DNA, 33 bp, Homo sapiens
gactgtgcttagaaggaccttaataaataacat

SEQ ID NO: 43926 - DNA, 33 bp, Homo sapiens
tttgcatctaagcctacgttgatgggatcaatg

SEQ ID NO: 43927 - DNA, 33 bp, Homo sapiens
ttttagaaacgcttccactctgttaagatttaa

SEQ ID NO: 43928 - DNA, 33 bp, Homo sapiens
aggttcggataaagatcacaggaagatgagcag

SEQ ID NO: 43929 - DNA, 33 bp, Homo sapiens
cactcattgcccctgcagaatccacacaccccc

SEQ ID NO: 43930 - DNA, 33 bp, Homo sapiens
tgccccagctagggataactttcaggtgtgacc

SEQ ID NO: 43931 - DNA, 33 bp, Homo sapiens
caaagcactgtgcatgaattaactcctttattc

SEQ ID NO: 43932 - DNA, 33 bp, Homo sapiens
tagagaaattgaggccagattgcattcttcaaa

SEQ ID NO: 43933 - DNA, 33 bp, Homo sapiens
ttttcactgaaaataaaggttactaagagttac

SEQ ID NO: 43934 - DNA, 33 bp, Homo sapiens
catgaaataaggtggacctgtgtagccaacagg

SEQ ID NO: 43935 - DNA, 33 bp, Homo sapiens
taaggaggacttagcacgaggctgctttctctg

SEQ ID NO: 43936 - DNA, 33 bp, Homo sapiens
agaaatgtgttcaatacacaacattaggagaat

SEQ ID NO: 43937 - DNA, 33 bp, Homo sapiens
caaatgactatttctacgtgtagaccccagggc

SEQ ID NO: 43938 - DNA, 33 bp, Homo sapiens
gataatatccaacctaccggcaactttcgactt

SEQ ID NO: 43939 - DNA, 33 bp, Homo sapiens
acacttttccagtggacgtgaaatgttatgata

SEQ ID NO: 43940 - DNA, 33 bp, Homo sapiens
ctgtttgcaagggctaaagactagaaacaatct

SEQ ID NO: 43941 - DNA, 33 bp, Homo sapiens
aggttatatttgggaaagtatggattacagaga

SEQ ID NO: 43942 - DNA, 33 bp, Homo sapiens
gggagacatagccgaaagttttagtcactgtgc

SEQ ID NO: 43943 - DNA, 33 bp, Homo sapiens
tctggcagagtccaaactcaaacgcctggagca

SEQ ID NO: 43944 - DNA, 33 bp, Homo sapiens
aactatagtccgatacagtataagtgtgtcaaa

SEQ ID NO: 43945 - DNA, 33 bp, Homo sapiens
attctccttggcaagccaggctcatccacttac

SEQ ID NO: 43946 - DNA, 33 bp, Homo sapiens
ttgtcatacatcatggccatagcttttgcagtt

SEQ ID NO: 43947 - DNA, 33 bp, Homo sapiens
ttgtgaaggaaatctaagggacttggtaacgga

SEQ ID NO: 43948 - DNA, 51 bp, Homo sapiens
ttacacttgctgttgataaactcgacaactgctccttgtttaggtctcacc

SEQ ID NO: 43949 - DNA, 33 bp, Homo sapiens
atttctgatttttacagtattgcaaacctagat

SEQ ID NO: 43950 - DNA, 51 bp, Homo sapiens
ttgcggaggagccgtcattacaacaatcgtgttctgagactaggagcaacg

SEQ ID NO: 43951 - DNA, 51 bp, Homo sapiens
tactcaggctaaaagtcagtaaaaacacataactcactttgtgccattacc

SEQ ID NO: 43952 - DNA, 51 bp, Homo sapiens
aataataaaaagagtaagaatgacaactaactatcagtcaggagaggttag

SEQ ID NO: 43953 - DNA, 33 bp, Homo sapiens
tccatcaaggaacctccagtgttgcaggcaaga

SEQ ID NO: 43954 - DNA, 33 bp, Homo sapiens
cttctacgaatgtctacaggaacaaagggaaac

SEQ ID NO: 43955 - DNA, 33 bp, Homo sapiens
acttcatacctgtcagcatggctagaattaaaa

SEQ ID NO: 43956 - DNA, 33 bp, Homo sapiens
gaaagcacagataccaataatgttcaacaattc

SEQ ID NO: 43957 - DNA, 33 bp, Homo sapiens
taaacggactgtgagccgatgagtagcatttac

SEQ ID NO: 43958 - DNA, 33 bp, Homo sapiens
cacagtgcaagacatcaagacctcgagtttagc

SEQ ID NO: 43959 - DNA, 33 bp, Homo sapiens
cacacaggaaattttgaaagggacacatggcag

SEQ ID NO: 43960 - DNA, 33 bp, Homo sapiens
tggctaagcctctgccaactacactggcttcta

SEQ ID NO: 43961 - DNA, 33 bp, Homo sapiens
caagtgcatatatgaacaggcggctctccgagg

SEQ ID NO: 43962 - DNA, 33 bp, Homo sapiens
caggtacccagcaaaccggatgctcagccaagg

SEQ ID NO: 43963 - DNA, 33 bp, Homo sapiens
gaaaagtgaatactgcccggagctccggagaca

SEQ ID NO: 43964 - DNA, 33 bp, Homo sapiens
atgaggaaggctgcagacagagcaaattgagga

SEQ ID NO: 43965 - DNA, 33 bp, Homo sapiens
attgatgttttacgtgaacataacctgaatctt

SEQ ID NO: 43966 - DNA, 33 bp, Homo sapiens
tcccgactctgtttcaccagtcgctcccccagg

SEQ ID NO: 43967 - DNA, 33 bp, Homo sapiens
aattgctttattgaagcatagttgtctaaggtt

SEQ ID NO: 43968 - DNA, 33 bp, Homo sapiens
ttattgccttttctcaggttattttgaaattta

SEQ ID NO: 43969 - DNA, 33 bp, Homo sapiens
tcctgatggtcctcgcaacttctgagtcactcc

SEQ ID NO: 43970 - DNA, 33 bp, Homo sapiens
gctctattcagaaaggcactgtgacatggccct

SEQ ID NO: 43971 - DNA, 33 bp, Homo sapiens
gaaaggaaaagaatcactaagttgcaaaagtca

SEQ ID NO: 43972 - DNA, 33 bp, Homo sapiens
caagggcctggtatgacgttgtggcaatctcat

SEQ ID NO: 43973 - DNA, 33 bp, Homo sapiens
tctcccaacactgaaacgtgccttgcctggctt

SEQ ID NO: 43974 - DNA, 33 bp, Homo sapiens
aatgagatggtatttgcaaagtggttagtacac

SEQ ID NO: 43975 - DNA, 33 bp, Homo sapiens
gaaatatttccatcccaaatagctaaacttaaa

SEQ ID NO: 43976 - DNA, 33 bp, Homo sapiens
ctgtgttaggtcacggaagaagtgagggtgaca

SEQ ID NO: 43977 - DNA, 33 bp, Homo sapiens
acttgttatcagcacaagaaaataacaagaagt

SEQ ID NO: 43978 - DNA, 33 bp, Homo sapiens
ggtgaggttatggagaccgctcttgtcagaatt

SEQ ID NO: 43979 - DNA, 51 bp, Homo sapiens
ttctctgagagtttcccaaattattcgtcattggcagagcgcctccatgga

SEQ ID NO: 43980 - DNA, 33 bp, Homo sapiens
gaaagccaatcactgacacaccaagtattgcca

SEQ ID NO: 43981 - DNA, 33 bp, Homo sapiens
gaagcaatgcgccccccaaccagtgtgatggag

SEQ ID NO: 43982 - DNA, 51 bp, Homo sapiens
taaatttcacctcagctaagatagcccctccacctcctagaaggataatat

SEQ ID NO: 43983 - DNA, 33 bp, Homo sapiens
ttgctttctcactcctcaaatactgcttcatct

SEQ ID NO: 43984 - DNA, 33 bp, Homo sapiens
catctgggaatcagcactagctggccgagttta

SEQ ID NO: 43985 - DNA, 33 bp, Homo sapiens
catcagtcttctaagcaaggagaacctttttaa

SEQ ID NO: 43986 - DNA, 33 bp, Homo sapiens
tgcaaatctctgtgaacgttaccagctttaagt

SEQ ID NO: 43987 - DNA, 33 bp, Homo sapiens
cacctttcccaacctacccatagctcgaaagtc

SEQ ID NO: 43988 - DNA, 33 bp, Homo sapiens
ggaattgagaatgaccacagacttgactagctg

SEQ ID NO: 43989 - DNA, 33 bp, Homo sapiens
tctatgttcaaaccagaatcagagagaatagaa

SEQ ID NO: 43990 - DNA, 33 bp, Homo sapiens
aaacactgtggttaaagaaagattttgagtcct

SEQ ID NO: 43991 - DNA, 33 bp, Homo sapiens
gacctctgccttcaataaacttaacaaccagta

SEQ ID NO: 43992 - DNA, 33 bp, Homo sapiens
tggcttcattgctagacaactgagtgcttgctt

SEQ ID NO: 43993 - DNA, 33 bp, Homo sapiens
cctaacctcttttgtacctctcttgaagctatc

SEQ ID NO: 43994 - DNA, 33 bp, Homo sapiens
atagatgcagaatggactaggtgtgcgataaat

SEQ ID NO: 43995 - DNA, 33 bp, Homo sapiens
gttgcatgtcaagataatactgttaggaagtac

SEQ ID NO: 43996 - DNA, 33 bp, Homo sapiens
tgaaactctgcagtcactatctatgctgaaaga

SEQ ID NO: 43997 - DNA, 33 bp, Homo sapiens
gactgaggcacagacaaggaacacaatcgcctc

SEQ ID NO: 43998 - DNA, 33 bp, Homo sapiens
aatctaagtagaggccacgatacctccacagct

SEQ ID NO: 43999 - DNA, 33 bp, Homo sapiens
cactatctgttgaaggccacacttgtgcccaca

SEQ ID NO: 44000 - DNA, 33 bp, Homo sapiens
ttccataaggaactgccaaactttcttccaaag

SEQ ID NO: 44001 - DNA, 33 bp, Homo sapiens
ctacattttatgggacaattggtacctggagtg

SEQ ID NO: 44002 - DNA, 33 bp, Homo sapiens
gccctttgggcatctcactaatctgaatcctct

SEQ ID NO: 44003 - DNA, 33 bp, Homo sapiens
ggccagctgtcagcaccgagatgggggtagtga

SEQ ID NO: 44004 - DNA, 33 bp, Homo sapiens
tcacagtgtaaggtagacattgacaatcttcct

SEQ ID NO: 44005 - DNA, 33 bp, Homo sapiens
atttattcaatggacacagaacaagtatttaag

SEQ ID NO: 44006 - DNA, 33 bp, Homo sapiens
ttgcactaatggcttcaacataattgctagtag

SEQ ID NO: 44007 - DNA, 33 bp, Homo sapiens
acttgcttaggcccgactaacatttgcactcac

SEQ ID NO: 44008 - DNA, 33 bp, Homo sapiens
tggagacatgtagaaaggaaagttgagggcagg

SEQ ID NO: 44009 - DNA, 33 bp, Homo sapiens
cccctgaattgctgcaactctctttagccctca

SEQ ID NO: 44010 - DNA, 33 bp, Homo sapiens
tctaagatcaaccagagagtaagagatagagtt

SEQ ID NO: 44011 - DNA, 33 bp, Homo sapiens
aaattaatttcaagctaagagtgcacaggtttg

SEQ ID NO: 44012 - DNA, 33 bp, Homo sapiens
tggccctgtacttcaacatgaccacactttaga

SEQ ID NO: 44013 - DNA, 33 bp, Homo sapiens
acagaacttcaccaaacggacttctcaaagatc

SEQ ID NO: 44014 - DNA, 33 bp, Homo sapiens
tatggattctctcaaacaccaagaaaagaaatg

SEQ ID NO: 44015 - DNA, 33 bp, Homo sapiens
aagtgaatttgacacaatcccttccctcaaaga

SEQ ID NO: 44016 - DNA, 33 bp, Homo sapiens
gcttattgccttttccagaagtagggagcagca

SEQ ID NO: 44017 - DNA, 33 bp, Homo sapiens
agggtattttaaagcaaatcctaagcaacatat

SEQ ID NO: 44018 - DNA, 33 bp, Homo sapiens
gcttccaacttccctacgacaacacccttgaat

SEQ ID NO: 44019 - DNA, 33 bp, Homo sapiens
tcagtgggaaatgtaaatatgggggagctcagg

SEQ ID NO: 44020 - DNA, 33 bp, Homo sapiens
gtcccactgtacccaagttctccctctctgaac

SEQ ID NO: 44021 - DNA, 33 bp, Homo sapiens
gttggtggtcttgttaccagaagaaagttacta

SEQ ID NO: 44022 - DNA, 33 bp, Homo sapiens
ttagtatctctgacagcactgtgtttagtgtga

SEQ ID NO: 44023 - DNA, 33 bp, Homo sapiens
atctgaacaccttgcaatcgttgcggacaaaca

SEQ ID NO: 44024 - DNA, 33 bp, Homo sapiens
tgggagatggcaggaaaaaaagcctaaagtaat

SEQ ID NO: 44025 - DNA, 33 bp, Homo sapiens
ttgagactctgtacaaattcctaccttccccat

SEQ ID NO: 44026 - DNA, 33 bp, Homo sapiens
ataatcactgttgtaacaagaagagcaagatat

SEQ ID NO: 44027 - DNA, 33 bp, Homo sapiens
cagagctgagagagaaacccttgagttgtgttg

SEQ ID NO: 44028 - DNA, 33 bp, Homo sapiens
acagacattattagcaagagttttaaacaagtc

SEQ ID NO: 44029 - DNA, 51 bp, Homo sapiens
gcaggagaggccagcagcaaggataagaaaaaggagtattagaaagagcat

SEQ ID NO: 44030 - DNA, 51 bp, Homo sapiens
tggcagtcaccctcagagcccagaacagcagaatataacagaaaacaggaa

SEQ ID NO: 44031 - DNA, 33 bp, Homo sapiens
ggtcacgtgggaagacagtcaaccagctgcagt

SEQ ID NO: 44032 - DNA, 33 bp, Homo sapiens
atagcatctgcttttaaaaggagctgacatttt

SEQ ID NO: 44033 - DNA, 33 bp, Homo sapiens
ttccgtatatcttgtaaagggcctgtgttgttc

SEQ ID NO: 44034 - DNA, 33 bp, Homo sapiens
ctaggacaaagcaggtaaaatatctggggacga

SEQ ID NO: 44035 - DNA, 33 bp, Homo sapiens
aatgcttccaagtgaaagctaatcagagcacgg

SEQ ID NO: 44036 - DNA, 33 bp, Homo sapiens
aggttgcctttgcatgcagaacagggtacaaga

SEQ ID NO: 44037 - DNA, 51 bp, Homo sapiens
gtctggcatggttcaatggttgcaccaccttcaacaacctgtctagaaggg

SEQ ID NO: 44038 - DNA, 33 bp, Homo sapiens
ctcttggtccagaactaaggcctacatgcatcc

SEQ ID NO: 44039 - DNA, 33 bp, Homo sapiens
tggggcacagtgggggaagaatgcacagacact

SEQ ID NO: 44040 - DNA, 33 bp, Homo sapiens
gcacagtgaagtaaaacgagggtaaaggtgctg

SEQ ID NO: 44041 - DNA, 51 bp, Homo sapiens
ccattattccctcatcagtgcccacaacgatgtacccccttttatcattcc

SEQ ID NO: 44042 - DNA, 33 bp, Homo sapiens
gaaggccttggttttccagagcccaaccctaag

SEQ ID NO: 44043 - DNA, 33 bp, Homo sapiens
ctacgattcataatgacatccgtgtgcacacca

SEQ ID NO: 44044 - DNA, 33 bp, Homo sapiens
ctggactccagtccccaagtgtaaccagaggca

SEQ ID NO: 44045 - DNA, 33 bp, Homo sapiens
tgccatcccgtcactaaaagatgcctagcctta

SEQ ID NO: 44046 - DNA, 33 bp, Homo sapiens
aattttacacagcttcaagtggttcatgaactc

SEQ ID NO: 44047 - DNA, 33 bp, Homo sapiens
cactatgggaatttgaggggtgcattaaagtag

SEQ ID NO: 44048 - DNA, 33 bp, Homo sapiens
ggacaaagatgagatacgagtgtttattcaacc

SEQ ID NO: 44049 - DNA, 33 bp, Homo sapiens
gatgaattaaggtatcaaaggatggagacaaga

SEQ ID NO: 44050 - DNA, 33 bp, Homo sapiens
aaagaccagggatacacctcttgtccaatagct

SEQ ID NO: 44051 - DNA, 33 bp, Homo sapiens
acattaagttccaggaaacctcaagagtatgag

SEQ ID NO: 44052 - DNA, 33 bp, Homo sapiens
tttgctattaaacttcacttctgcagcagaatg

SEQ ID NO: 44053 - DNA, 33 bp, Homo sapiens
gtagtgagacctccaaaataaaatgctactagg

SEQ ID NO: 44054 - DNA, 33 bp, Homo sapiens
ctggtgaggtgtacaacgagccctcctcagatg

SEQ ID NO: 44055 - DNA, 33 bp, Homo sapiens
ggaaacagttcagactaaaataaacaaatcatt

SEQ ID NO: 44056 - DNA, 33 bp, Homo sapiens
cggctgcccacccttcaacactattacccatcg

SEQ ID NO: 44057 - DNA, 33 bp, Homo sapiens
tacctcaagtactcaccatgaccccatcaacag

SEQ ID NO: 44058 - DNA, 33 bp, Homo sapiens
acacatacctagaacacagcctaaaaaagcatc

SEQ ID NO: 44059 - DNA, 33 bp, Homo sapiens
caggacgacatggacaatagcgtcttctccagg

SEQ ID NO: 44060 - DNA, 33 bp, Homo sapiens
tgggagacgtcgttaaatgatgttgccagggta

SEQ ID NO: 44061 - DNA, 51 bp, Homo sapiens
cactgattgatacatctttcagtaaatgaattcggcacatccacagtgtcc

SEQ ID NO: 44062 - DNA, 33 bp, Homo sapiens
ccacctcctggacagacaaggatgaagttcact

SEQ ID NO: 44063 - DNA, 51 bp, Homo sapiens
atcagaactttctggcaaagtcggaaaggaggctttggtaaaacaagattg

SEQ ID NO: 44064 - DNA, 33 bp, Homo sapiens
tcttccaagtgaggacaatgcggcttgcctttg

SEQ ID NO: 44065 - DNA, 33 bp, Homo sapiens
ctgcaggcatagaaagcaactggactgcacctg

SEQ ID NO: 44066 - DNA, 33 bp, Homo sapiens
ccccatctagtcccaacgcaacaacctatgcaa

SEQ ID NO: 44067 - DNA, 33 bp, Homo sapiens
ccaaaatgtgtgatcaacaagaatggagtcttt

SEQ ID NO: 44068 - DNA, 33 bp, Homo sapiens
tatggattaccaaaagccctgcgctaggtccct

SEQ ID NO: 44069 - DNA, 33 bp, Homo sapiens
gcttctaagtacagcaagcctaaggcagtgtgt

SEQ ID NO: 44070 - DNA, 33 bp, Homo sapiens
tgttgcaggagagtaaagaaagcactttgttat

SEQ ID NO: 44071 - DNA, 33 bp, Homo sapiens
gaggcggtgaggaagaacatcagaagagatggc

SEQ ID NO: 44072 - DNA, 33 bp, Homo sapiens
agtgctagggaatcacagtgaaagccagtccct

SEQ ID NO: 44073 - DNA, 33 bp, Homo sapiens
gagctcagtctggagaagaagacaagtaaagaa

SEQ ID NO: 44074 - DNA, 33 bp, Homo sapiens
aaatgacccttcagtaggtcattttctcactga

SEQ ID NO: 44075 - DNA, 33 bp, Homo sapiens
tcaataaatctgcctaaaatgttcaaaaattac

SEQ ID NO: 44076 - DNA, 33 bp, Homo sapiens
tttctctctgccatgcaaggccacttcaagaag

SEQ ID NO: 44077 - DNA, 33 bp, Homo sapiens
agagtgatatttattgaaaacttactacctgaa

SEQ ID NO: 44078 - DNA, 33 bp, Homo sapiens
actgcaagctggcactaaagaggattagactta

SEQ ID NO: 44079 - DNA, 33 bp, Homo sapiens
ttttcaaagttggacaaaaaatacaggagtaat

SEQ ID NO: 44080 - DNA, 33 bp, Homo sapiens
tggattcttcttctacaatatcctttggctctt

SEQ ID NO: 44081 - DNA, 33 bp, Homo sapiens
gggtgacgctgaagagaaagagttgagtctgtc

SEQ ID NO: 44082 - DNA, 33 bp, Homo sapiens
aaatcagagtgcaaaaaccataacggtacagct

SEQ ID NO: 44083 - DNA, 33 bp, Homo sapiens
gggacaaaaatgtgccacttgaaactgagttta

SEQ ID NO: 44084 - DNA, 33 bp, Homo sapiens
actactatccaattccagaacctgtgcctgtgt

SEQ ID NO: 44085 - DNA, 33 bp, Homo sapiens
atcagtatgttcacaaaataaattgagtaaacc

SEQ ID NO: 44086 - DNA, 33 bp, Homo sapiens
aagtggtcagattgaagaacatgattgattaca

SEQ ID NO: 44087 - DNA, 33 bp, Homo sapiens
cccaagaatggaaataagagtcaaaacagcctc

SEQ ID NO: 44088 - DNA, 33 bp, Homo sapiens
tgagattgctgctcagaacttaggagagccatc

SEQ ID NO: 44089 - DNA, 33 bp, Homo sapiens
tctcttctgaaatcaacagtccccctagtagct

SEQ ID NO: 44090 - DNA, 33 bp, Homo sapiens
ctatcaatgagggttaaaaaaacaacaacgaag

SEQ ID NO: 44091 - DNA, 33 bp, Homo sapiens
gcaaacacataagaaccacatagtaaaagagtg

SEQ ID NO: 44092 - DNA, 33 bp, Homo sapiens
tctgcttcccaacttcccacttccaggcaggcc

SEQ ID NO: 44093 - DNA, 33 bp, Homo sapiens
atggaaacaggaagtcaccttaggcttgaagca

SEQ ID NO: 44094 - DNA, 33 bp, Homo sapiens
tcagtttcttgatctggaaaagggaatgataac

SEQ ID NO: 44095 - DNA, 33 bp, Homo sapiens
ggaggatatctgaaataagaagtgaaggatgtg

SEQ ID NO: 44096 - DNA, 33 bp, Homo sapiens
tgaattctggaaaggaaatgcaggtttaagtat

SEQ ID NO: 44097 - DNA, 51 bp, Homo sapiens
gccttctgagtcttctggggaggtcaaatcttctctgacccagcaggagac

SEQ ID NO: 44098 - DNA, 33 bp, Homo sapiens
aggagaggacccagaaactttttatgctccttg

SEQ ID NO: 44099 - DNA, 33 bp, Homo sapiens
ctttctcgaaagagtcaatcgatgtagcaaact

SEQ ID NO: 44100 - DNA, 33 bp, Homo sapiens
aagttaccctcggcccagacgttgccttccttt

SEQ ID NO: 44101 - DNA, 33 bp, Homo sapiens
attttcctttcagggccatatagactgttcgtc

SEQ ID NO: 44102 - DNA, 33 bp, Homo sapiens
agagagaccttcacaaataataagacccaagaa

SEQ ID NO: 44103 - DNA, 33 bp, Homo sapiens
aataagcaagagccctcacttgtccatgaaatt

SEQ ID NO: 44104 - DNA, 33 bp, Homo sapiens
ctgttggctgtggatcaatctgggccctctcac

SEQ ID NO: 44105 - DNA, 33 bp, Homo sapiens
ttattaagtctctcaaataaaatgccagacatg

SEQ ID NO: 44106 - DNA, 33 bp, Homo sapiens
aggagatgtaaagaatgaggaagttaagcttta

SEQ ID NO: 44107 - DNA, 33 bp, Homo sapiens
tgtctttgctattttgaatagtgctacaatgaa

SEQ ID NO: 44108 - DNA, 33 bp, Homo sapiens
gagaggcatcagactacgctgcaggtttggccc

SEQ ID NO: 44109 - DNA, 33 bp, Homo sapiens
aactcccactaccttaaacaaagccattagaga

SEQ ID NO: 44110 - DNA, 33 bp, Homo sapiens
tgtctgacattgatgcaaaaagtaaagtaaaag

SEQ ID NO: 44111 - DNA, 33 bp, Homo sapiens
ctcaaaatgacataccaatgaccaataggtata

SEQ ID NO: 44112 - DNA, 33 bp, Homo sapiens
aagagttgtcatcatccactggttcagctgtgg

SEQ ID NO: 44113 - DNA, 33 bp, Homo sapiens
aatgggcaagagaatagccagactagctaggac

SEQ ID NO: 44114 - DNA, 33 bp, Homo sapiens
ttttgaagactaaccaaggtttctttgaagtga

SEQ ID NO: 44115 - DNA, 33 bp, Homo sapiens
ggtggagaaagaaaaccgtagagcaagccaact

SEQ ID NO: 44116 - DNA, 33 bp, Homo sapiens
gaaactgaggccaagtaaataggttcacagggc

SEQ ID NO: 44117 - DNA, 33 bp, Homo sapiens
gtaaatctctcagacaatagagagacgaaggat

SEQ ID NO: 44118 - DNA, 33 bp, Homo sapiens
tcatgtcaccaaattaagaagaggcactaggaa

SEQ ID NO: 44119 - DNA, 33 bp, Homo sapiens
tatgcttgagtaactacattccggggtctatat

SEQ ID NO: 44120 - DNA, 33 bp, Homo sapiens
catggcttctcaatcaagcaagtacatgtttta

SEQ ID NO: 44121 - DNA, 33 bp, Homo sapiens
agtaatcgatgggctacatgaggtagaagttgt

SEQ ID NO: 44122 - DNA, 33 bp, Homo sapiens
ttaggaaagtcgctgcaaactggtactataaat

SEQ ID NO: 44123 - DNA, 33 bp, Homo sapiens
aaccaaatttgcgttaccataaaacccatgagc

SEQ ID NO: 44124 - DNA, 33 bp, Homo sapiens
ggacacgattataccaaaagatgaactgcatga

SEQ ID NO: 44125 - DNA, 33 bp, Homo sapiens
tttctagtttgggggaaaaattgtcacttgaat

SEQ ID NO: 44126 - DNA, 33 bp, Homo sapiens
tatttaaaacctgaaacggaagactgtacaaat

SEQ ID NO: 44127 - DNA, 33 bp, Homo sapiens
tgtccaaaagactcagaagtgatatatttagat

SEQ ID NO: 44128 - DNA, 33 bp, Homo sapiens
atcatgagttttaaccacttcacacctgcagtt

SEQ ID NO: 44129 - DNA, 33 bp, Homo sapiens
aatatagccatgtatgaaaattttaatctagaa

SEQ ID NO: 44130 - DNA, 33 bp, Homo sapiens
ggtagaaaaagataccaaaatgtcatggtgata

SEQ ID NO: 44131 - DNA, 51 bp, Homo sapiens
agaaataatgtgggctgctttcacactcctcttaagtaaaaatcccctgcc

SEQ ID NO: 44132 - DNA, 33 bp, Homo sapiens
agaatggataagaatacatatggatgctagtga

SEQ ID NO: 44133 - DNA, 33 bp, Homo sapiens
ccggtatatacaccagaccaagacaatataagg

SEQ ID NO: 44134 - DNA, 33 bp, Homo sapiens
aaataatttcacctcaccagatttgtcctttca

SEQ ID NO: 44135 - DNA, 33 bp, Homo sapiens
taaaaccatgtatgcaaatcactaaacgtagag

SEQ ID NO: 44136 - DNA, 33 bp, Homo sapiens
agaaagctaaatcagcagccacaagaatagtat

SEQ ID NO: 44137 - DNA, 33 bp, Homo sapiens
tgttgtcatttgctgaagatggtgctcctgcaa

SEQ ID NO: 44138 - DNA, 33 bp, Homo sapiens
attttgtcattgtcccaccttgggtcttttcca

SEQ ID NO: 44139 - DNA, 33 bp, Homo sapiens
tatcatttcctaggtcaaattctctaaggaaga

SEQ ID NO: 44140 - DNA, 33 bp, Homo sapiens
cttgtggaagaggaggccagaataaaaggagaa

SEQ ID NO: 44141 - DNA, 51 bp, Homo sapiens
tctataaagcagatattttccatcactgagattctttcaaattctgaaaaa

SEQ ID NO: 44142 - DNA, 33 bp, Homo sapiens
ttatactgccactttccctagtctctgtagctc

SEQ ID NO: 44143 - DNA, 33 bp, Homo sapiens
atgaataatataatgaaccctcacacctccatc

SEQ ID NO: 44144 - DNA, 33 bp, Homo sapiens
ttgtgacacggagtacactgatgacctcagagc

SEQ ID NO: 44145 - DNA, 33 bp, Homo sapiens
acacttaactcacttcaatcttctaaatacgtg

SEQ ID NO: 44146 - DNA, 33 bp, Homo sapiens
tgatgcctgccactcaatagatgctagttcttc

SEQ ID NO: 44147 - DNA, 33 bp, Homo sapiens
ccgtggaaatttcttacgggctggtgctgttcc

SEQ ID NO: 44148 - DNA, 33 bp, Homo sapiens
acccaggctactcatacactcatgagaaataat

SEQ ID NO: 44149 - DNA, 51 bp, Homo sapiens
ctcagggcatgtcttctacaatattctatgtcatctagaccatttcaaatc

SEQ ID NO: 44150 - DNA, 33 bp, Homo sapiens
aagactctcttcaaaaaaacaaaaaaagcagct

SEQ ID NO: 44151 - DNA, 33 bp, Homo sapiens
tacacagggtgagaaacccatgatccctggcct

SEQ ID NO: 44152 - DNA, 33 bp, Homo sapiens
ggtagtggaatcaagaagttgctgtttttgcta

SEQ ID NO: 44153 - DNA, 33 bp, Homo sapiens
catgaggaggctgtaaccactgaaataggccag

SEQ ID NO: 44154 - DNA, 51 bp, Homo sapiens
tacaggcacaaaattattactcgacacagaatgagttggtgctttccagag

SEQ ID NO: 44155 - DNA, 33 bp, Homo sapiens
tagggaagtgcttacacatcaatctgtacatgt

SEQ ID NO: 44156 - DNA, 33 bp, Homo sapiens
tgggcttttccactaccgctcaaaatagtaata

SEQ ID NO: 44157 - DNA, 33 bp, Homo sapiens
actcttaccacaaagcgcaagtcagcttggcct

SEQ ID NO: 44158 - DNA, 33 bp, Homo sapiens
tgcccagcaggataccccattcttcacgatgtg

SEQ ID NO: 44159 - DNA, 33 bp, Homo sapiens
tcccaggtgctcccagaacatttaatttgtagt

SEQ ID NO: 44160 - DNA, 33 bp, Homo sapiens
ctttactctgtggatccaatctttcactttttt

SEQ ID NO: 44161 - DNA, 33 bp, Homo sapiens
tcatacctcttactaccggcttcagtatcaaaa

SEQ ID NO: 44162 - DNA, 51 bp, Homo sapiens
actgagcccagctctaattctaaaaactttaatatgactttcaagatttta

SEQ ID NO: 44163 - DNA, 33 bp, Homo sapiens
tgctagaaaactgctacacaaacatcatcagta

SEQ ID NO: 44164 - DNA, 33 bp, Homo sapiens
tgtctgcaatagagacacagagacgatgaattc

SEQ ID NO: 44165 - DNA, 33 bp, Homo sapiens
caaggctggtctttcccctaccttgagttccca

SEQ ID NO: 44166 - DNA, 33 bp, Homo sapiens
tgcaattgctgaaccacgtggtaactctatgtt

SEQ ID NO: 44167 - DNA, 33 bp, Homo sapiens
cccccattgaccagagaaaaaaatagctgctgg

SEQ ID NO: 44168 - DNA, 33 bp, Homo sapiens
atgggggaggataatacgaatgaaggtctaggg

SEQ ID NO: 44169 - DNA, 33 bp, Homo sapiens
atcaaaaatcatctcactagggtcagagggggc

SEQ ID NO: 44170 - DNA, 33 bp, Homo sapiens
tgctcattgaacagaaagatctcaaggctgggt

SEQ ID NO: 44171 - DNA, 33 bp, Homo sapiens
tacagcaataatgctcccgagtctcatttccca

SEQ ID NO: 44172 - DNA, 33 bp, Homo sapiens
caataaactggaaggaagaaaaactatcactgc

SEQ ID NO: 44173 - DNA, 33 bp, Homo sapiens
agaaaaagcccaaacacgtgaacataagaggtc

SEQ ID NO: 44174 - DNA, 33 bp, Homo sapiens
ttcctggggaaaaaaaacatcttgtaatgtatg

SEQ ID NO: 44175 - DNA, 33 bp, Homo sapiens
tccagcttgtggacaaaagacctaatggttccc

SEQ ID NO: 44176 - DNA, 33 bp, Homo sapiens
ctattcctagactctaacctagttctcataact

SEQ ID NO: 44177 - DNA, 33 bp, Homo sapiens
ggagaaattactctcaacctatctttttcaatt

SEQ ID NO: 44178 - DNA, 33 bp, Homo sapiens
cacattaaggcttccacagtctcagagtttcta

SEQ ID NO: 44179 - DNA, 33 bp, Homo sapiens
caggccaattgtcttacactgactgataaaagc

SEQ ID NO: 44180 - DNA, 33 bp, Homo sapiens
ctggtagtttgcagaaaagatgagagtcaggaa

SEQ ID NO: 44181 - DNA, 33 bp, Homo sapiens
ttcaagatgcactgacacattgcattatccccc

SEQ ID NO: 44182 - DNA, 33 bp, Homo sapiens
tccttaggggtagccactgaagcaaatgatgat

SEQ ID NO: 44183 - DNA, 33 bp, Homo sapiens
ctgacatcagagaagggcaggctttactccttt

SEQ ID NO: 44184 - DNA, 33 bp, Homo sapiens
atgggcatctttataacgagtatgagttgaaat

SEQ ID NO: 44185 - DNA, 33 bp, Homo sapiens
aaatttcgacttcctgaaggatttcaatctatt

SEQ ID NO: 44186 - DNA, 33 bp, Homo sapiens
tgtagctgttgttcaccaagagatagcccctct

SEQ ID NO: 44187 - DNA, 33 bp, Homo sapiens
caagctatgcagctctgaagtgcaagggctagg

SEQ ID NO: 44188 - DNA, 33 bp, Homo sapiens
acagtccgggctttaacaggggagcctggaaca

SEQ ID NO: 44189 - DNA, 33 bp, Homo sapiens
tagcccctggcaatcaccactctactttgttta

SEQ ID NO: 44190 - DNA, 51 bp, Homo sapiens
ctagcctgtgtggccatatgcagtaacactgaatagatttaaagtaatttg

SEQ ID NO: 44191 - DNA, 33 bp, Homo sapiens
tgatgagttaaaggagcaagtctcaaaataata

SEQ ID NO: 44192 - DNA, 33 bp, Homo sapiens
tttagcagacgaaaacaactttggtagtgccag

SEQ ID NO: 44193 - DNA, 33 bp, Homo sapiens
aggggctggtttgataccttgtggtcttcctgc

SEQ ID NO: 44194 - DNA, 33 bp, Homo sapiens
tctcagttatgctaggaagaaaggagctcttgt

SEQ ID NO: 44195 - DNA, 33 bp, Homo sapiens
gtcaggttctggtcacactgtcattctggctgc

SEQ ID NO: 44196 - DNA, 33 bp, Homo sapiens
ttacagaaagagaaggccattgcttgcaaacaa

SEQ ID NO: 44197 - DNA, 33 bp, Homo sapiens
tagttacacagatacacgcacctttttatttat

SEQ ID NO: 44198 - DNA, 33 bp, Homo sapiens
tgaacatggcagctaaacattggcacaagtctt

SEQ ID NO: 44199 - DNA, 33 bp, Homo sapiens
cttcagtcactgggaagcagcgcctctgcctac

SEQ ID NO: 44200 - DNA, 33 bp, Homo sapiens
agtaacagccatgaaaccaacaaaccgcatcac

SEQ ID NO: 44201 - DNA, 33 bp, Homo sapiens
cagatagtttaggctaacaatgtgattgatggt

SEQ ID NO: 44202 - DNA, 33 bp, Homo sapiens
atttttacttttcacaatctctctaacatgacc

SEQ ID NO: 44203 - DNA, 33 bp, Homo sapiens
taactgttaaatttggacaccatcgttgtttca

SEQ ID NO: 44204 - DNA, 33 bp, Homo sapiens
tgactgatttggatgaggacattcccactgagc

SEQ ID NO: 44205 - DNA, 33 bp, Homo sapiens
tgtcattctggttttacacgccagtggatggat

SEQ ID NO: 44206 - DNA, 51 bp, Homo sapiens
ataaagagatccggtttcttaagcaaagtctcccagatcatacgcccacct

SEQ ID NO: 44207 - DNA, 33 bp, Homo sapiens
aaagcatactgacaaacctttgagactgtaaat

SEQ ID NO: 44208 - DNA, 51 bp, Homo sapiens
cgcccctgtacagtagattcttttaacaccacctcagaacacactgaacag

SEQ ID NO: 44209 - DNA, 33 bp, Homo sapiens
gtattggcaagagaaccgagtttcaggccggtg

SEQ ID NO: 44210 - DNA, 33 bp, Homo sapiens
aatctcatctgccacaagagactaaatctagcc

SEQ ID NO: 44211 - DNA, 33 bp, Homo sapiens
ttaatgtggattgttacagtcaggcaattatcc

SEQ ID NO: 44212 - DNA, 51 bp, Homo sapiens
tacttatgcatggtctaatgaattccctttcttcttgtttgtgcaatggct

SEQ ID NO: 44213 - DNA, 33 bp, Homo sapiens
tctatagcaccttcacagatatcagccaggccc

SEQ ID NO: 44214 - DNA, 33 bp, Homo sapiens
gtagtagcccagaagacgagaaaaaaggagttc

SEQ ID NO: 44215 - DNA, 33 bp, Homo sapiens
ggaaagcaagaggtaaatacaggtcaaatcaaa

SEQ ID NO: 44216 - DNA, 33 bp, Homo sapiens
ttactttgctttctcacccatccgattcaaaat

SEQ ID NO: 44217 - DNA, 33 bp, Homo sapiens
ggatgagtggggaatacagtgagtgcttgatat

SEQ ID NO: 44218 - DNA, 33 bp, Homo sapiens
atgatggtatttaaggacactactgatgttctt

SEQ ID NO: 44219 - DNA, 33 bp, Homo sapiens
ttctcattcaggtctcccaacaatagtgcaaag

SEQ ID NO: 44220 - DNA, 33 bp, Homo sapiens
cacttctctgcaaatacgtaaaagggaatggca

SEQ ID NO: 44221 - DNA, 33 bp, Homo sapiens
ggtggtcttgcattgactaagagggtaagtgga

SEQ ID NO: 44222 - DNA, 33 bp, Homo sapiens
tgcctgggaagaagcaagagtaagttcatgaaa

SEQ ID NO: 44223 - DNA, 33 bp, Homo sapiens
gctttacaaaatatgccgcaccgggagagtgga

SEQ ID NO: 44224 - DNA, 33 bp, Homo sapiens
gcagcaaccttccaagccttcgagtgctattgc

SEQ ID NO: 44225 - DNA, 33 bp, Homo sapiens
cctgtcctctctttaaatgctccaaatatgctt

SEQ ID NO: 44226 - DNA, 33 bp, Homo sapiens
tttgggcatacaggccagatatacacacacagg

SEQ ID NO: 44227 - DNA, 33 bp, Homo sapiens
tctctctcttctaacaatgatggtactggtata

SEQ ID NO: 44228 - DNA, 33 bp, Homo sapiens
aatgtggtagaagtaaagttataagagttctag

SEQ ID NO: 44229 - DNA, 33 bp, Homo sapiens
cctcttagctatgtgccctttgaaaattaaact

SEQ ID NO: 44230 - DNA, 33 bp, Homo sapiens
tatgtggagtttcaagaaatggtagaacattta

SEQ ID NO: 44231 - DNA, 33 bp, Homo sapiens
aaagcatctgctcatcaaaagacactgaaaaaa

SEQ ID NO: 44232 - DNA, 33 bp, Homo sapiens
gacaggataacaatacaatatctggactgtctg

SEQ ID NO: 44233 - DNA, 33 bp, Homo sapiens
ataactttggttccaagattttgattttctaat

SEQ ID NO: 44234 - DNA, 33 bp, Homo sapiens
attgccttggtagaaaagagtatggtgggcacc

SEQ ID NO: 44235 - DNA, 33 bp, Homo sapiens
gttgtcacagccagaacattttacaacagtgtg

SEQ ID NO: 44236 - DNA, 33 bp, Homo sapiens
cagcccaactaaaccaccaactccaagactcac

SEQ ID NO: 44237 - DNA, 33 bp, Homo sapiens
gggctcatgaactgaacagagggaatccagaaa

SEQ ID NO: 44238 - DNA, 33 bp, Homo sapiens
ttatagctatcataaaagtgaagaaaaacatcc

SEQ ID NO: 44239 - DNA, 33 bp, Homo sapiens
gataacaatccaacacagtgcttatggagcatg

SEQ ID NO: 44240 - DNA, 33 bp, Homo sapiens
ataatgacggagcacccacaagaaacatccaag

SEQ ID NO: 44241 - DNA, 33 bp, Homo sapiens
tggtatgatctgaattcaagagtcctttctggc

SEQ ID NO: 44242 - DNA, 33 bp, Homo sapiens
gaggtccacgcttagcagaatttgtagaatgga

SEQ ID NO: 44243 - DNA, 33 bp, Homo sapiens
acaaagactcatattaccagcctcttaaataca

SEQ ID NO: 44244 - DNA, 33 bp, Homo sapiens
gatctacttggctccaaattccacactgtcttc

SEQ ID NO: 44245 - DNA, 33 bp, Homo sapiens
aaaaaaagaaaggcaaatcagaggaaggggata

SEQ ID NO: 44246 - DNA, 33 bp, Homo sapiens
tgtggtataagagaaggagctaaacagagaaat

SEQ ID NO: 44247 - DNA, 33 bp, Homo sapiens
taagagacttgcaatgaatgtaataactggatg

SEQ ID NO: 44248 - DNA, 33 bp, Homo sapiens
agttgtttggggaaaactatgtccactagacct

SEQ ID NO: 44249 - DNA, 33 bp, Homo sapiens
acgttcttcttctagacggtctcatggttggcc

SEQ ID NO: 44250 - DNA, 33 bp, Homo sapiens
gcataacctggtgggaaatggtggtaccgccgc

SEQ ID NO: 44251 - DNA, 33 bp, Homo sapiens
tgttcctgctttgggacgctcttgctatgacat

SEQ ID NO: 44252 - DNA, 33 bp, Homo sapiens
tgttgcttagtacttacgactgagacttacacc

SEQ ID NO: 44253 - DNA, 33 bp, Homo sapiens
atttctttactattcacctatgcattgtgtatt

SEQ ID NO: 44254 - DNA, 33 bp, Homo sapiens
ccccaggcttgccccacgtttccacttttccct

SEQ ID NO: 44255 - DNA, 51 bp, Homo sapiens
gagaatgttaagtcttgcagtattgcttaaccctgaaggagtttgtgttag

SEQ ID NO: 44256 - DNA, 33 bp, Homo sapiens
aggttcacctgattccccgacccatctggcttg

SEQ ID NO: 44257 - DNA, 33 bp, Homo sapiens
ttcctaacttgtatacaccaaccggaacattct

SEQ ID NO: 44258 - DNA, 33 bp, Homo sapiens
aatccaatgggcaggacgagaaaaacacatgga

SEQ ID NO: 44259 - DNA, 33 bp, Homo sapiens
cgaaaggattttggtcaagggagtacaagaccc

SEQ ID NO: 44260 - DNA, 33 bp, Homo sapiens
taaaggtacgtccatccgaacaaatggagaaac

SEQ ID NO: 44261 - DNA, 33 bp, Homo sapiens
gctttgtggcgtgtaacaaagactgccgagcag

SEQ ID NO: 44262 - DNA, 33 bp, Homo sapiens
aggcatggcacagaacaagggacgaaacaattg

SEQ ID NO: 44263 - DNA, 33 bp, Homo sapiens
ttcacttgtcttcttcactgtggtacctccagc

SEQ ID NO: 44264 - DNA, 33 bp, Homo sapiens
ttcgcaaatctctgccacacaaaatcatgagca

SEQ ID NO: 44265 - DNA, 33 bp, Homo sapiens
agcccgtgttcttctcgccttgccagctgtctg

SEQ ID NO: 44266 - DNA, 33 bp, Homo sapiens
gtggatgggcaagtgacagatgtgtggaaactc

SEQ ID NO: 44267 - DNA, 33 bp, Homo sapiens
tgcctagctcaaggccaataaccatgttgaacc

SEQ ID NO: 44268 - DNA, 51 bp, Homo sapiens
ttcttattgggtgctggtatattctatcatttagagaggtctgagagaaga

SEQ ID NO: 44269 - DNA, 33 bp, Homo sapiens
acgcagctgcacctgggacagcagacacagctg

SEQ ID NO: 44270 - DNA, 33 bp, Homo sapiens
tgtctcaggtctacacaagacagggagtgggag

SEQ ID NO: 44271 - DNA, 33 bp, Homo sapiens
gtgaagagggaatcaaatgtgcaagggttttac

SEQ ID NO: 44272 - DNA, 33 bp, Homo sapiens
ttggaagctgcagtccactccgtctccttccag

SEQ ID NO: 44273 - DNA, 33 bp, Homo sapiens
gccagctaatttataacgtcatatgggctagac

SEQ ID NO: 44274 - DNA, 33 bp, Homo sapiens
gctgctgcagtctgaacggtgacggtggcccct

SEQ ID NO: 44275 - DNA, 33 bp, Homo sapiens
tctgtgaagatgtggtcaagtcacaagtgatac

SEQ ID NO: 44276 - DNA, 51 bp, Homo sapiens
ttatctttaaacaccttttgaaatactactcttcctggtgtctgaattaga

SEQ ID NO: 44277 - DNA, 51 bp, Homo sapiens
gcaagctttttctgtaaaggaccacagagtaaacattttcaactttgtggg

SEQ ID NO: 44278 - DNA, 33 bp, Homo sapiens
catgtgcttttaaacacgtctttcaaagatcac

SEQ ID NO: 44279 - DNA, 33 bp, Homo sapiens
gcagatataatgactcgaatacctgtagccatc

SEQ ID NO: 44280 - DNA, 33 bp, Homo sapiens
gatcctgcccactctacaaatgaggacaccagg

SEQ ID NO: 44281 - DNA, 33 bp, Homo sapiens
gttcttcaatttgagacgaggccagactggatt

SEQ ID NO: 44282 - DNA, 33 bp, Homo sapiens
ggtcagtggtcattggaattcaagctaagtctt

SEQ ID NO: 44283 - DNA, 51 bp, Homo sapiens
acgttcagcactttgcaaactagaacatgccccagaggctccgggtgcaac

SEQ ID NO: 44284 - DNA, 33 bp, Homo sapiens
cgccccatccatgagcaagccaagggtagtatc

SEQ ID NO: 44285 - DNA, 33 bp, Homo sapiens
cactgtgcaaggtagacagtaactttttaaata

SEQ ID NO: 44286 - DNA, 33 bp, Homo sapiens
aacagagagcgccccaactgtgtatccacaggg

SEQ ID NO: 44287 - DNA, 33 bp, Homo sapiens
tgccacgcaaaaccccaagcactttgtaggcat

SEQ ID NO: 44288 - DNA, 33 bp, Homo sapiens
ccagacaactgaagacagcctatagcccagagc

SEQ ID NO: 44289 - DNA, 33 bp, Homo sapiens
cttcctcccaaaggaaacctccatctctagttg

SEQ ID NO: 44290 - DNA, 33 bp, Homo sapiens
tactctgtacccagaaatctcacctttcctggg

SEQ ID NO: 44291 - DNA, 33 bp, Homo sapiens
gccagaaaagagaaacaaggctacacgcaggac

SEQ ID NO: 44292 - DNA, 33 bp, Homo sapiens
tagagtccaggtccacaggaagtagttaaggtt

SEQ ID NO: 44293 - DNA, 33 bp, Homo sapiens
cttgccttgggacaccaatactcagctgacagc

SEQ ID NO: 44294 - DNA, 33 bp, Homo sapiens
tttgtggaaagcaacaatacatatcagtcaatg

SEQ ID NO: 44295 - DNA, 33 bp, Homo sapiens
ggttaagaagcaggaacgtttgtcttgaggcca

SEQ ID NO: 44296 - DNA, 33 bp, Homo sapiens
agagaaaaaagctcagcattagcagagaagacg

SEQ ID NO: 44297 - DNA, 33 bp, Homo sapiens
gcccgccaagatctacggaatcggacaccctgg

SEQ ID NO: 44298 - DNA, 33 bp, Homo sapiens
tgtcacgaggaaggtacgaggaaggctgtcccc

SEQ ID NO: 44299 - DNA, 33 bp, Homo sapiens
gcaacttgcagttccgaagagcgctggctgctt

SEQ ID NO: 44300 - DNA, 33 bp, Homo sapiens
ccacatggggcctcgcactcgcgttacccttcc

SEQ ID NO: 44301 - DNA, 33 bp, Homo sapiens
gcaaaaatcaaatccaatcaaactaaatcacca

SEQ ID NO: 44302 - DNA, 33 bp, Homo sapiens
cctaactgtaacatcaagggaaagtgataggaa

SEQ ID NO: 44303 - DNA, 33 bp, Homo sapiens
tgtccctgaacaccaaataccgagacagctgat

SEQ ID NO: 44304 - DNA, 33 bp, Homo sapiens
agaacctttcacacgcaatctcagaatttacaa

SEQ ID NO: 44305 - DNA, 33 bp, Homo sapiens
tttggtctctttgggaagaagttatacaaaaag

SEQ ID NO: 44306 - DNA, 51 bp, Homo sapiens
tggatcgtttcagtagcttatctgaagagcctctgcctagctgaaggtcac

SEQ ID NO: 44307 - DNA, 33 bp, Homo sapiens
tgttgtaggcaatgtgcaattcctgaaaggctg

SEQ ID NO: 44308 - DNA, 33 bp, Homo sapiens
acagttttgaacacagaattaactaggtcttga

SEQ ID NO: 44309 - DNA, 51 bp, Homo sapiens
aaaatgttttaaaattccagattaagtgcacatttacttctttttttttct

SEQ ID NO: 44310 - DNA, 33 bp, Homo sapiens
aagccacagtacaaacaagtgagttgggttttt

SEQ ID NO: 44311 - DNA, 33 bp, Homo sapiens
agtgcccggcacattacacatgcttaatagaca

SEQ ID NO: 44312 - DNA, 33 bp, Homo sapiens
gtcccatttatcactcacagtcctgaatttggt

SEQ ID NO: 44313 - DNA, 51 bp, Homo sapiens
gtaggagagccatcccgggcagccaatagtatgtgcaaacgcttgcaaaca

SEQ ID NO: 44314 - DNA, 33 bp, Homo sapiens
caaaatgaaatgttccccaaacaatattcagaa

SEQ ID NO: 44315 - DNA, 51 bp, Homo sapiens
ttgggataagatgagcctcctgggacgcaaacactcctgaattagagtcat

SEQ ID NO: 44316 - DNA, 51 bp, Homo sapiens
ataggctggtgttaactggcccaagaactgacattaaaagcttggttagaa

SEQ ID NO: 44317 - DNA, 33 bp, Homo sapiens
ctccctcctactcccagactgtgatcaactgta

SEQ ID NO: 44318 - DNA, 33 bp, Homo sapiens
agaatagacttcaacaaggagcctgtggtatga

SEQ ID NO: 44319 - DNA, 33 bp, Homo sapiens
tggcaataaattttaccatttctctggctctca

SEQ ID NO: 44320 - DNA, 33 bp, Homo sapiens
ttcacttgtgccttatcaattgcatttgttcac

SEQ ID NO: 44321 - DNA, 33 bp, Homo sapiens
agaaacaatggaagtccaaacctgtaaaataat

SEQ ID NO: 44322 - DNA, 51 bp, Homo sapiens
aaaattaacacaggacaaatctataagactttgagtttggtgataagatat

SEQ ID NO: 44323 - DNA, 33 bp, Homo sapiens
ttcaccttaatcctaccgggggcttagctgtat

SEQ ID NO: 44324 - DNA, 33 bp, Homo sapiens
tatgaattttggttcaacttccatagctgtact

SEQ ID NO: 44325 - DNA, 33 bp, Homo sapiens
agccacaggtaaccacggatctcagaacaaaga

SEQ ID NO: 44326 - DNA, 33 bp, Homo sapiens
ctgtttcctttcacaaccacctcttgcacactg

SEQ ID NO: 44327 - DNA, 33 bp, Homo sapiens
tctcagaagcccttgaaactactgtgcctgaat

SEQ ID NO: 44328 - DNA, 51 bp, Homo sapiens
taatatatagatgtgttttataatacgttttcagaaaggcagttttttttt

SEQ ID NO: 44329 - DNA, 33 bp, Homo sapiens
aacaagtacaatacaccggaatgggacgcaaag

SEQ ID NO: 44330 - DNA, 33 bp, Homo sapiens
tggaagtaggagtaggaagaggagagtgtcccc

SEQ ID NO: 44331 - DNA, 33 bp, Homo sapiens
aggctgaaaactgcataagctcagctgtcccat

SEQ ID NO: 44332 - DNA, 51 bp, Homo sapiens
tttgttgtttgtttgtgatacggtacattagttttttattgctgctgtaac

SEQ ID NO: 44333 - DNA, 33 bp, Homo sapiens
atgcagcggtaaaaaagtaataaggatgatctc

SEQ ID NO: 44334 - DNA, 33 bp, Homo sapiens
gcctcgccagctttaacaaccgtttggatatga

SEQ ID NO: 44335 - DNA, 33 bp, Homo sapiens
tggctgttacagtgaacattaaagacttaaaat

SEQ ID NO: 44336 - DNA, 51 bp, Homo sapiens
ctctttttgaaaagtctagggtatacacagtagcattgctttgaagaggaa

SEQ ID NO: 44337 - DNA, 33 bp, Homo sapiens
atgcaggaagcaataacatgtggcactattgtc

SEQ ID NO: 44338 - DNA, 33 bp, Homo sapiens
aatgttaattgctctcgaatgtcatcagatctt

SEQ ID NO: 44339 - DNA, 33 bp, Homo sapiens
aagataaaaagctggacggaaagttgaacttac

SEQ ID NO: 44340 - DNA, 33 bp, Homo sapiens
gggacctccttgggcaaaaatcatccgtagctc

SEQ ID NO: 44341 - DNA, 33 bp, Homo sapiens
taccataaagacccacacatgcaaacgttcatt

SEQ ID NO: 44342 - DNA, 33 bp, Homo sapiens
gtgcacctggctacacaagagtactaaggatcc

SEQ ID NO: 44343 - DNA, 33 bp, Homo sapiens
gatgagatactgtctcacagatgtcagaatgtc

SEQ ID NO: 44344 - DNA, 33 bp, Homo sapiens
tattatagcggaccttaaaaaatacgttatttg

SEQ ID NO: 44345 - DNA, 33 bp, Homo sapiens
gttagttaataacaaaactgtggtcatttctcc

SEQ ID NO: 44346 - DNA, 33 bp, Homo sapiens
tgctttatgccttctcaatcataaaaggaagat

SEQ ID NO: 44347 - DNA, 33 bp, Homo sapiens
atttcaaacctacccccgatgcctcaaacctac

SEQ ID NO: 44348 - DNA, 33 bp, Homo sapiens
tgtctggatttgtccaaagcacccagaacaatg

SEQ ID NO: 44349 - DNA, 33 bp, Homo sapiens
gtggggcctaatgggaagtttagatcatgagga

SEQ ID NO: 44350 - DNA, 33 bp, Homo sapiens
taactctgcttataaaaggggtgtattctccct

SEQ ID NO: 44351 - DNA, 33 bp, Homo sapiens
gagcaaaaataactgacacttgcaaaggaatgc

SEQ ID NO: 44352 - DNA, 33 bp, Homo sapiens
acgttttagctcctcaaattaattctgaagcat

SEQ ID NO: 44353 - DNA, 33 bp, Homo sapiens
tatcaatatctcacaaccttacaaagttgaaat

SEQ ID NO: 44354 - DNA, 51 bp, Homo sapiens
tgaaggatccctgggagtgattgtgcacctgagctgtggcttttgtctaag

SEQ ID NO: 44355 - DNA, 33 bp, Homo sapiens
agatacttcagagaacaatgaaaatgcacatcc

SEQ ID NO: 44356 - DNA, 33 bp, Homo sapiens
tttctaacacagaggaaccaacaaatgtgatgt

SEQ ID NO: 44357 - DNA, 51 bp, Homo sapiens
ttttcttcatccaaggaaaacaaaccctttgctatcatttctctatccttc

SEQ ID NO: 44358 - DNA, 33 bp, Homo sapiens
ttgttatcactctgaccggtgtcttgttttctg

SEQ ID NO: 44359 - DNA, 33 bp, Homo sapiens
atacaagtagcaagaaatgaaatatagctggct

SEQ ID NO: 44360 - DNA, 33 bp, Homo sapiens
ttcttccttttcttacaagggcataatcgtgtc

SEQ ID NO: 44361 - DNA, 33 bp, Homo sapiens
ccctccctgcatggaagtgactaaatagcagca

SEQ ID NO: 44362 - DNA, 33 bp, Homo sapiens
cctttcccacggctcacctctctcttggagttc

SEQ ID NO: 44363 - DNA, 33 bp, Homo sapiens
taattgaaagtgtatacgtagaggactgatagc

SEQ ID NO: 44364 - DNA, 33 bp, Homo sapiens
ttaattttttgatatacgtgtttacagctataa

SEQ ID NO: 44365 - DNA, 33 bp, Homo sapiens
gctactgcaaagataccggctttaactctgaat

SEQ ID NO: 44366 - DNA, 33 bp, Homo sapiens
gtcaagcatggttgaactcactggcataaaacc

SEQ ID NO: 44367 - DNA, 33 bp, Homo sapiens
ccgaattgtcaccagccgatctgatgtccctcc

SEQ ID NO: 44368 - DNA, 33 bp, Homo sapiens
gaggtaggagttacctaaatttggagaaagcag

SEQ ID NO: 44369 - DNA, 33 bp, Homo sapiens
actcaggtaatataaacgagggccggaaatgag

SEQ ID NO: 44370 - DNA, 33 bp, Homo sapiens
ctagggttgatggagaaaatcgtgttgtacgag

SEQ ID NO: 44371 - DNA, 33 bp, Homo sapiens
tatacacgtacgcatagataaatgtgaaataaa

SEQ ID NO: 44372 - DNA, 33 bp, Homo sapiens
atagtgaccatcaataccttggagggtagagga

SEQ ID NO: 44373 - DNA, 33 bp, Homo sapiens
taggaaacttgcaaaaaagagttagttcactta

SEQ ID NO: 44374 - DNA, 33 bp, Homo sapiens
tgttctatttttcaacgggcacatatcagtatt

SEQ ID NO: 44375 - DNA, 33 bp, Homo sapiens
caaaatctcaatagcaccaaggttaagaaaccc

SEQ ID NO: 44376 - DNA, 33 bp, Homo sapiens
ggcagtctggtccctgaaataagacctgctgtt

SEQ ID NO: 44377 - DNA, 33 bp, Homo sapiens
taagctactcttggacacaggctctgctcactt

SEQ ID NO: 44378 - DNA, 33 bp, Homo sapiens
ctggtttgcctctacaccactggcaatgccttc

SEQ ID NO: 44379 - DNA, 33 bp, Homo sapiens
taatcataactgacaagctattaagggtacttg

SEQ ID NO: 44380 - DNA, 33 bp, Homo sapiens
atgtgagttgtagagcaagcatcaaatcatggt

SEQ ID NO: 44381 - DNA, 33 bp, Homo sapiens
ggatgtagcctattgccgaaaacaatgataaaa

SEQ ID NO: 44382 - DNA, 51 bp, Homo sapiens
gtcccagttcatctctttgaggaaacaaagggctctaggggtgaaggaagg

SEQ ID NO: 44383 - DNA, 33 bp, Homo sapiens
tctaatctctgtatctgaattcctgcatctgat

SEQ ID NO: 44384 - DNA, 33 bp, Homo sapiens
acgtggtatcagtctacggagaggctaagctca

SEQ ID NO: 44385 - DNA, 33 bp, Homo sapiens
aaggataaggttaaatcacaccctacaaaccat

SEQ ID NO: 44386 - DNA, 33 bp, Homo sapiens
catttgatttttcctacgaagtctttgaaatca

SEQ ID NO: 44387 - DNA, 33 bp, Homo sapiens
ttattctatctcaaagactcaagacttggacta

SEQ ID NO: 44388 - DNA, 51 bp, Homo sapiens
tttcccagtttggtgatacaacaacacttggagaattcaaagcctcttatt

SEQ ID NO: 44389 - DNA, 33 bp, Homo sapiens
gttttgaaaaataggcaaaaaagtgtaggagaa

SEQ ID NO: 44390 - DNA, 33 bp, Homo sapiens
tggttacgagttcacaacattttcagtgttaag

SEQ ID NO: 44391 - DNA, 33 bp, Homo sapiens
tatcccatcaagagaacgagctactcacttgac

SEQ ID NO: 44392 - DNA, 33 bp, Homo sapiens
ggaaagggcacagatacggcaactcatccccca

SEQ ID NO: 44393 - DNA, 33 bp, Homo sapiens
gtgtgctcacaatgcaacttttacactcagaga

SEQ ID NO: 44394 - DNA, 51 bp, Homo sapiens
gaaatggtgactagccccagcataacgtttcttcaattttttaaaaaccac

SEQ ID NO: 44395 - DNA, 33 bp, Homo sapiens
tgttgcttcaaataacaagatttcattcttttt

SEQ ID NO: 44396 - DNA, 33 bp, Homo sapiens
ccatcgctttccttaaaatagatatcatgaaaa

SEQ ID NO: 44397 - DNA, 33 bp, Homo sapiens
gcttttagtgtatttaccaagatgttccaccat

SEQ ID NO: 44398 - DNA, 33 bp, Homo sapiens
tgctgtgtgtttactccagaacgccctgctcac

SEQ ID NO: 44399 - DNA, 33 bp, Homo sapiens
ggaaatcattgcatagacctctccctgacaata

SEQ ID NO: 44400 - DNA, 33 bp, Homo sapiens
tacattacatatcctgaagcgcacgtgtaaaag

SEQ ID NO: 44401 - DNA, 51 bp, Homo sapiens
acaaataaaaaagaactagtcagcccatatgtaacacatattcaacaaatc

SEQ ID NO: 44402 - DNA, 33 bp, Homo sapiens
aggcagaggcttcagcataagatcccacagctt

SEQ ID NO: 44403 - DNA, 33 bp, Homo sapiens
atgttggtaattcttggactagttcaatctttt

SEQ ID NO: 44404 - DNA, 33 bp, Homo sapiens
ataatgttaacttaaaatatgtcacaaagatct

SEQ ID NO: 44405 - DNA, 33 bp, Homo sapiens
ctgttcttgcaactaacgagcatggattggagc

SEQ ID NO: 44406 - DNA, 33 bp, Homo sapiens
gtgatctgactctacaacctcagcacctaattt

SEQ ID NO: 44407 - DNA, 33 bp, Homo sapiens
gatgcacttggcaccgcatagtttttctcgggc

SEQ ID NO: 44408 - DNA, 51 bp, Homo sapiens
catcgaagtctcaaatgtagtgtccaagatgagaaatgtcattcaggaatt

SEQ ID NO: 44409 - DNA, 33 bp, Homo sapiens
ataatagacaagaataagcaggaaaagtctcaa

SEQ ID NO: 44410 - DNA, 33 bp, Homo sapiens
taaaccaaggtttcccaggattgtctaacttag

SEQ ID NO: 44411 - DNA, 33 bp, Homo sapiens
gatgtctgtggccgcaatatcagaacgttataa

SEQ ID NO: 44412 - DNA, 33 bp, Homo sapiens
gagcaaaatgtcaagaaatctagaggtggtgta

SEQ ID NO: 44413 - DNA, 33 bp, Homo sapiens
ggtttggacaaagaaccgttctcgtcattgttt

SEQ ID NO: 44414 - DNA, 33 bp, Homo sapiens
ctgtatacgatatatactactcaggtgataggt

SEQ ID NO: 44415 - DNA, 33 bp, Homo sapiens
aaaaatctggaaaataataatgactcaataaat

SEQ ID NO: 44416 - DNA, 33 bp, Homo sapiens
gccccggataaccccacagaatatagccagaga

SEQ ID NO: 44417 - DNA, 33 bp, Homo sapiens
caatgtctccttcccacggatttttcacctcaa

SEQ ID NO: 44418 - DNA, 33 bp, Homo sapiens
aacacatggaaaaggactagtgtagacagatca

SEQ ID NO: 44419 - DNA, 33 bp, Homo sapiens
agttatgtagcatgaacgtggaataacccatca

SEQ ID NO: 44420 - DNA, 33 bp, Homo sapiens
gtactaggaagaacccacacttttgatctcaat

SEQ ID NO: 44421 - DNA, 33 bp, Homo sapiens
atctacttacatcttaaagcatttgaggtcaat

SEQ ID NO: 44422 - DNA, 51 bp, Homo sapiens
ggtgtagattgttccacttcttgaactgtaaagcccaacctctagaaaggg

SEQ ID NO: 44423 - DNA, 33 bp, Homo sapiens
tttgggagtcagaatacggatcgaggtgagtca

SEQ ID NO: 44424 - DNA, 33 bp, Homo sapiens
ggaaggcaagtcaggactcatatcggtacagat

SEQ ID NO: 44425 - DNA, 33 bp, Homo sapiens
agagaaaagcgtgcaaataagtgctccgtgagg

SEQ ID NO: 44426 - DNA, 33 bp, Homo sapiens
tgactgtcactgataacaagaccgataagcaga

SEQ ID NO: 44427 - DNA, 33 bp, Homo sapiens
ctaattttgagttcataaaatggtgctttttgt

SEQ ID NO: 44428 - DNA, 33 bp, Homo sapiens
gaaggttttatttcaacttcgaaggtgtcatca

SEQ ID NO: 44429 - DNA, 33 bp, Homo sapiens
ttctgcacagggttcacagtatttcataggaca

SEQ ID NO: 44430 - DNA, 33 bp, Homo sapiens
atcttttcttaccaaaagtctcacaaaaccagt

SEQ ID NO: 44431 - DNA, 51 bp, Homo sapiens
cctgccgttgatggtctgttgaaccactccccgtctcactattccatgagt

SEQ ID NO: 44432 - DNA, 33 bp, Homo sapiens
tttactttccatctcactcctcaaaatatcctc

SEQ ID NO: 44433 - DNA, 33 bp, Homo sapiens
taatgccatgaagggaaaaaacaggattctcag

SEQ ID NO: 44434 - DNA, 51 bp, Homo sapiens
agaactgatgcttcaagaagatgaacaaagtttgagcaacagtgtgcagtg

SEQ ID NO: 44435 - DNA, 51 bp, Homo sapiens
ccttgctcgtagtagctgcctttcacagactacattccctgtgtcattcac

SEQ ID NO: 44436 - DNA, 33 bp, Homo sapiens
atggtattaactttgacgtaatttgcattttgg

SEQ ID NO: 44437 - DNA, 33 bp, Homo sapiens
tataataagcaaaacactgtgacaactaaggtg

SEQ ID NO: 44438 - DNA, 33 bp, Homo sapiens
acactctcactccaccagcaatgagttaggtat

SEQ ID NO: 44439 - DNA, 33 bp, Homo sapiens
gcagaaaatgatccaacggcttcccgctgctca

SEQ ID NO: 44440 - DNA, 33 bp, Homo sapiens
tcaggtggcaggtgtagctctattcggtgagaa

SEQ ID NO: 44441 - DNA, 33 bp, Homo sapiens
atggctaaagtaaggacatgcaataaaaattta

SEQ ID NO: 44442 - DNA, 33 bp, Homo sapiens
cctattggatagttccaacatctgggccaggcc

SEQ ID NO: 44443 - DNA, 33 bp, Homo sapiens
ctagtcaagagtagaactgatgtaaggctaaag

SEQ ID NO: 44444 - DNA, 33 bp, Homo sapiens
cttcttcctccctaacagaaccttgactttgtg

SEQ ID NO: 44445 - DNA, 33 bp, Homo sapiens
ttccaaggcaattgaccactttagttatccctc

SEQ ID NO: 44446 - DNA, 33 bp, Homo sapiens
atgccttggttcgggcgcttcctgagactctca

SEQ ID NO: 44447 - DNA, 51 bp, Homo sapiens
ggttttgattacctatgactgacaccggcccaaatgacttggtatggacag

SEQ ID NO: 44448 - DNA, 33 bp, Homo sapiens
ggcaattcagaactaacgttgtaagatctctag

SEQ ID NO: 44449 - DNA, 33 bp, Homo sapiens
cattttaagcacattacacctgagtgattgttg

SEQ ID NO: 44450 - DNA, 33 bp, Homo sapiens
gcagtacatatcaaaggcctcttgactcagata

SEQ ID NO: 44451 - DNA, 33 bp, Homo sapiens
tacaaatgttacagttaaaagtatatgcacctt

SEQ ID NO: 44452 - DNA, 51 bp, Homo sapiens
caatttaaaaacagttaaatgcataaaacaaagcagtagcacaaataaaac

SEQ ID NO: 44453 - DNA, 51 bp, Homo sapiens
ttggttaaaaatgacaaaaagacttaaaatggacttgtcaggagtgtgcta

SEQ ID NO: 44454 - DNA, 33 bp, Homo sapiens
caggttcctcacagcccgctttttctgtagccc

SEQ ID NO: 44455 - DNA, 33 bp, Homo sapiens
agccagattctgcttacgttttggttgccccat

SEQ ID NO: 44456 - DNA, 33 bp, Homo sapiens
accctgaactacattacgctgaacaagtaacca

SEQ ID NO: 44457 - DNA, 33 bp, Homo sapiens
agaatcatcctcttcacgttgttttaggatgta

SEQ ID NO: 44458 - DNA, 33 bp, Homo sapiens
ggagctctgtttcaaacacgttaatttctgttg

SEQ ID NO: 44459 - DNA, 33 bp, Homo sapiens
tgaagaggagcagagacgacttggccacccact

SEQ ID NO: 44460 - DNA, 33 bp, Homo sapiens
tctacctatcagaaaaagattacagaattcatg

SEQ ID NO: 44461 - DNA, 33 bp, Homo sapiens
ctgaaggcaattgcagaagccgtccaccgcatg

SEQ ID NO: 44462 - DNA, 33 bp, Homo sapiens
tcacttgataggcccaaattcatggcaggtcag

SEQ ID NO: 44463 - DNA, 33 bp, Homo sapiens
tagtgaggtcattaataaacagctgggtgaatg

SEQ ID NO: 44464 - DNA, 33 bp, Homo sapiens
ctcaccccacatgctacggagaacattttcagg

SEQ ID NO: 44465 - DNA, 33 bp, Homo sapiens
gctgttatttggacgacaggtttcccatccatt

SEQ ID NO: 44466 - DNA, 33 bp, Homo sapiens
gaattatttcaccacaacctttctggaaattgt

SEQ ID NO: 44467 - DNA, 51 bp, Homo sapiens
atcaaacatacagaacaggttgtgacgagttttatgtctgcttgcttgtgg

SEQ ID NO: 44468 - DNA, 33 bp, Homo sapiens
ccagcaattttggaagacgaaccaggaggatca

SEQ ID NO: 44469 - DNA, 33 bp, Homo sapiens
tctgtaacgatacttactaaaatgcaagtgata

SEQ ID NO: 44470 - DNA, 33 bp, Homo sapiens
tttgcaactactctcactaagttaccaagattt

SEQ ID NO: 44471 - DNA, 33 bp, Homo sapiens
tgaaacaacctaaacactaatgccgagtaatga

SEQ ID NO: 44472 - DNA, 33 bp, Homo sapiens
cctcattattgaacacagtcttacctaattttc

SEQ ID NO: 44473 - DNA, 33 bp, Homo sapiens
gaggggcccaacattaataatgattccatacca

SEQ ID NO: 44474 - DNA, 33 bp, Homo sapiens
ctttaaggtattggacaaatagtcaaatgttct

SEQ ID NO: 44475 - DNA, 33 bp, Homo sapiens
cacatcatgatggctacaaaatattgttgtaga

SEQ ID NO: 44476 - DNA, 33 bp, Homo sapiens
actattaacataatcaccttactgtgctatcca

SEQ ID NO: 44477 - DNA, 33 bp, Homo sapiens
gctcagtacatcataaatatttggcaaatgtta

SEQ ID NO: 44478 - DNA, 33 bp, Homo sapiens
tgcaaacaaataaaaggcatcattaccattgct

SEQ ID NO: 44479 - DNA, 33 bp, Homo sapiens
tactccagcaattcccagcagtcttttttaaac

SEQ ID NO: 44480 - DNA, 33 bp, Homo sapiens
ttctcttgaactccataagctgtagtaatcaac

SEQ ID NO: 44481 - DNA, 33 bp, Homo sapiens
tggctcccagcaaagacgactccaggctttctt

SEQ ID NO: 44482 - DNA, 33 bp, Homo sapiens
tgttgggctctgggaaagtgcatgtaggaagcc

SEQ ID NO: 44483 - DNA, 33 bp, Homo sapiens
tcatttctcaaccatcgattttcctgcttccaa

SEQ ID NO: 44484 - DNA, 33 bp, Homo sapiens
ttgctacagagaagaaattcctgtgctaagcat

SEQ ID NO: 44485 - DNA, 33 bp, Homo sapiens
gaagtaaaaatgagaaatgaggggtgtgatatt

SEQ ID NO: 44486 - DNA, 33 bp, Homo sapiens
gtgtagtactgcagtccgaactgtaagcatgaa

SEQ ID NO: 44487 - DNA, 33 bp, Homo sapiens
gcttttgtctcattaactatacctggacacact

SEQ ID NO: 44488 - DNA, 33 bp, Homo sapiens
gtctccaacttcctaaacaccagttactaataa

SEQ ID NO: 44489 - DNA, 33 bp, Homo sapiens
atgccataacatttaccccacaactactgctct

SEQ ID NO: 44490 - DNA, 33 bp, Homo sapiens
catttaatgtgttgaaagaaacagaccaccaac

SEQ ID NO: 44491 - DNA, 33 bp, Homo sapiens
agcccttctctggctcactgtttggcctgctgt

SEQ ID NO: 44492 - DNA, 33 bp, Homo sapiens
acttgtatacacccaaccatcgaaccaataatt

SEQ ID NO: 44493 - DNA, 33 bp, Homo sapiens
taaaccaggctggaaaaagtgctcctagagtat

SEQ ID NO: 44494 - DNA, 33 bp, Homo sapiens
tacatgggacttgaaacggatgtacatgggtgt

SEQ ID NO: 44495 - DNA, 33 bp, Homo sapiens
caaatgtaaccagctacgtgcgggtgtctggat

SEQ ID NO: 44496 - DNA, 51 bp, Homo sapiens
tttcctccatggagctacaacttaccatatcttccttcccccattctctga

SEQ ID NO: 44497 - DNA, 33 bp, Homo sapiens
tccttttgcctttattcaagtgagatttggctt

SEQ ID NO: 44498 - DNA, 33 bp, Homo sapiens
ctttcacagttgtatacgcagctagcaagaaaa

SEQ ID NO: 44499 - DNA, 33 bp, Homo sapiens
tggtatttattggagccgaatttcacctgtatt

SEQ ID NO: 44500 - DNA, 33 bp, Homo sapiens
gccttttcaggctgccaaaaattcatgttggcg

SEQ ID NO: 44501 - DNA, 33 bp, Homo sapiens
agtttagagtatcttaccaggcaagtggctaga

SEQ ID NO: 44502 - DNA, 33 bp, Homo sapiens
gccttcgtgcacaactcactaggccctgaggat

SEQ ID NO: 44503 - DNA, 33 bp, Homo sapiens
ctccccatcctcaaacccaggtaaaatgtttcg

SEQ ID NO: 44504 - DNA, 33 bp, Homo sapiens
acaacagaagtttctacgaactttgcacacaca

SEQ ID NO: 44505 - DNA, 33 bp, Homo sapiens
ggctgcagttattacactctctctattttcttg

SEQ ID NO: 44506 - DNA, 33 bp, Homo sapiens
tgccagcatccaatccaagaaccaatgaatcac

SEQ ID NO: 44507 - DNA, 33 bp, Homo sapiens
ctcaatgtagtacaaaaaaagatggtgatttct

SEQ ID NO: 44508 - DNA, 33 bp, Homo sapiens
ggaccttgagtgataacagtgtgtcaatgtttc

SEQ ID NO: 44509 - DNA, 33 bp, Homo sapiens
atttgatggtttttgtcaactgagcaagtattt

SEQ ID NO: 44510 - DNA, 33 bp, Homo sapiens
tcgtcaagtacctgtcaaaacgcaaccctctct

SEQ ID NO: 44511 - DNA, 33 bp, Homo sapiens
aatatgaagagcgtaccgtaatgtggcttaaac

SEQ ID NO: 44512 - DNA, 51 bp, Homo sapiens
tctcccattgttagcaattaggcaaagacattagtgacagaggggcatcca

SEQ ID NO: 44513 - DNA, 33 bp, Homo sapiens
aagagacaatgtcatgaaaaaggggagaacaga

SEQ ID NO: 44514 - DNA, 33 bp, Homo sapiens
gtcagtgttatcattacatttcttggtcatcca

SEQ ID NO: 44515 - DNA, 33 bp, Homo sapiens
actgtgggcaattttaagcacccaaccatggta

SEQ ID NO: 44516 - DNA, 33 bp, Homo sapiens
agaatgaaacaacatacctacgtagctagcaag

SEQ ID NO: 44517 - DNA, 33 bp, Homo sapiens
aacacaagtttttagaacacactgcatcagtga

SEQ ID NO: 44518 - DNA, 33 bp, Homo sapiens
cctttggtaacatcaaacctttggaaaagttgg

SEQ ID NO: 44519 - DNA, 33 bp, Homo sapiens
taggctatatcttgcacgttattgactcctatt

SEQ ID NO: 44520 - DNA, 33 bp, Homo sapiens
aacattttaagaggacactgaacattttcctag

SEQ ID NO: 44521 - DNA, 33 bp, Homo sapiens
ggatgtggaaggatacaaaaacagagataaagg

SEQ ID NO: 44522 - DNA, 33 bp, Homo sapiens
tactggatcacgtctaagaaaatttaaatatgc

SEQ ID NO: 44523 - DNA, 33 bp, Homo sapiens
tttcagttaaataatcagacaatgtatatgatt

SEQ ID NO: 44524 - DNA, 33 bp, Homo sapiens
attgatcttctctttacgccagatttaacagcg

SEQ ID NO: 44525 - DNA, 51 bp, Homo sapiens
ccttcctttatagaatgaatttgaaagagtagttaacaaatacgtaaatgc

SEQ ID NO: 44526 - DNA, 51 bp, Homo sapiens
gaaatttttcctggagtttataggccgattatattagtctgttctcacact

SEQ ID NO: 44527 - DNA, 33 bp, Homo sapiens
gaacctagtggcaccaacaggattgtcagagcc

SEQ ID NO: 44528 - DNA, 51 bp, Homo sapiens
tctgggaaactgaaaaataataataagccatgaatacctctatttttatgt

SEQ ID NO: 44529 - DNA, 33 bp, Homo sapiens
ctctttgcctttcaccactctggaaaacatcct

SEQ ID NO: 44530 - DNA, 33 bp, Homo sapiens
cccttaagtaactcgcacacgcgggacctgttc

SEQ ID NO: 44531 - DNA, 33 bp, Homo sapiens
gcccactgggaattaaaagaagtacccattcca

SEQ ID NO: 44532 - DNA, 33 bp, Homo sapiens
aactgccgatggttgcgatatggctatttccaa

SEQ ID NO: 44533 - DNA, 33 bp, Homo sapiens
ctgagtcagattaaaaatggactggcttccata

SEQ ID NO: 44534 - DNA, 33 bp, Homo sapiens
tttcacagttattatcacatctgaaccatatta

SEQ ID NO: 44535 - DNA, 33 bp, Homo sapiens
taccaactgtcaataacgtcacataaattacat

SEQ ID NO: 44536 - DNA, 33 bp, Homo sapiens
ttgcctcttacctcagaaaaggacaccatatgg

SEQ ID NO: 44537 - DNA, 33 bp, Homo sapiens
ctttcaagggtaaccaacttctcaacatgaaaa

SEQ ID NO: 44538 - DNA, 33 bp, Homo sapiens
ggtaataacatctaagaaatggctttctcctaa

SEQ ID NO: 44539 - DNA, 33 bp, Homo sapiens
acatatcaaactcaaaactcaaagctcatatat

SEQ ID NO: 44540 - DNA, 33 bp, Homo sapiens
tatttttaactgttccagaatatgtataggata

SEQ ID NO: 44541 - DNA, 33 bp, Homo sapiens
taatacatacactaaaacagttaggcgagggca

SEQ ID NO: 44542 - DNA, 33 bp, Homo sapiens
atgtaaactatgcttaagagaaatcagaaagtc

SEQ ID NO: 44543 - DNA, 33 bp, Homo sapiens
tgcatatacaaatacaatgcacccatgaaatga

SEQ ID NO: 44544 - DNA, 33 bp, Homo sapiens
ttcataatcatttccaacatttccaaagaactg

SEQ ID NO: 44545 - DNA, 33 bp, Homo sapiens
cacacattttcatagcccactttgtctaccaga

SEQ ID NO: 44546 - DNA, 51 bp, Homo sapiens
tgtgaaaaacacataggcaagataactagcccaatctagggaatttgacag

SEQ ID NO: 44547 - DNA, 33 bp, Homo sapiens
gagaggtataatcaagaagcgtgaagctgagtc

SEQ ID NO: 44548 - DNA, 33 bp, Homo sapiens
tccgaaatccttagtgcagcatttagaagtcct

SEQ ID NO: 44549 - DNA, 33 bp, Homo sapiens
gttttcctcttctttaactattctcaccgtctc

SEQ ID NO: 44550 - DNA, 33 bp, Homo sapiens
ttttagctgttgatcccgatgaacctgtccatg

SEQ ID NO: 44551 - DNA, 33 bp, Homo sapiens
agctaatttgaaatgactattgctactgataat

SEQ ID NO: 44552 - DNA, 33 bp, Homo sapiens
aagccaaataaaggcaacttcccatactcagat

SEQ ID NO: 44553 - DNA, 33 bp, Homo sapiens
agcaactgctggcaatcagaaatggatggaaat

SEQ ID NO: 44554 - DNA, 33 bp, Homo sapiens
gaacaattaaactcacggcaataggaaaaattc

SEQ ID NO: 44555 - DNA, 33 bp, Homo sapiens
agtcaggcatatcaataaaagtcctacatcaaa

SEQ ID NO: 44556 - DNA, 33 bp, Homo sapiens
actctctcaccttctacagcacaactggatttt

SEQ ID NO: 44557 - DNA, 33 bp, Homo sapiens
cacaaaaccccaaatgcatgcttgtaaactgaa

SEQ ID NO: 44558 - DNA, 33 bp, Homo sapiens
tatttgcatttctaaaactttgatatacttcct

SEQ ID NO: 44559 - DNA, 33 bp, Homo sapiens
ccctggaaagaaagaaagagccagaattcttgt

SEQ ID NO: 44560 - DNA, 33 bp, Homo sapiens
taaactgtctagctagcccttttggtatatgag

SEQ ID NO: 44561 - DNA, 51 bp, Homo sapiens
aaatacttttctaataattttgtgaagtaattgatctattgccttattatt

SEQ ID NO: 44562 - DNA, 33 bp, Homo sapiens
aagtactggtttgagaagactgaattggtgccc

SEQ ID NO: 44563 - DNA, 51 bp, Homo sapiens
gtacacagatactgaaaatgcacacactgcactcggcatcttcagcgcctc

SEQ ID NO: 44564 - DNA, 51 bp, Homo sapiens
atgaaagaatttaaggcaaattcaacgctgataatgaacattaatgtacat

SEQ ID NO: 44565 - DNA, 33 bp, Homo sapiens
gcttgacagaagtggacataaggaaagttgagg

SEQ ID NO: 44566 - DNA, 33 bp, Homo sapiens
ttctccaggcttctcccggaatattcatggcaa

SEQ ID NO: 44567 - DNA, 33 bp, Homo sapiens
gctccagggtaaaacacagcatggatcttcaaa

SEQ ID NO: 44568 - DNA, 33 bp, Homo sapiens
aacaggcttaacttaacgtggcaaatgattgag

SEQ ID NO: 44569 - DNA, 33 bp, Homo sapiens
atgagagcctaatgcaaaaggtgtctgtaagga

SEQ ID NO: 44570 - DNA, 33 bp, Homo sapiens
ccgcatttagagtccaaccaaatcactataaag

SEQ ID NO: 44571 - DNA, 33 bp, Homo sapiens
aattccaatagattcaacctcgaagggtcttct

SEQ ID NO: 44572 - DNA, 33 bp, Homo sapiens
ttgtaatcttcataaaagaacctgtaaaatttt

SEQ ID NO: 44573 - DNA, 33 bp, Homo sapiens
tgttgtagctattgcaaatgagatcttttcatt

SEQ ID NO: 44574 - DNA, 33 bp, Homo sapiens
tgaagttactcacaaacagacttggagcccgct

SEQ ID NO: 44575 - DNA, 51 bp, Homo sapiens
caaatattatagccacacagaatgaactttaaaatatggggctgagcaggg

SEQ ID NO: 44576 - DNA, 33 bp, Homo sapiens
aacaacaatttatgcaatctgctgtccataaat

SEQ ID NO: 44577 - DNA, 33 bp, Homo sapiens
taatgagaggtagttcgaaaatacaggcaatcc

SEQ ID NO: 44578 - DNA, 33 bp, Homo sapiens
tcttacaagatagaaacacctaaatgtgtacat

SEQ ID NO: 44579 - DNA, 33 bp, Homo sapiens
aaaataggccattatacggaaataccagtaata

SEQ ID NO: 44580 - DNA, 51 bp, Homo sapiens
gaatcaaattaaaatgttggaaatacagtcatcattaacatttttaaatgc

SEQ ID NO: 44581 - DNA, 51 bp, Homo sapiens
aacataattcagcataaccatgttaagtttctttcctatgttttcttgtct

SEQ ID NO: 44582 - DNA, 33 bp, Homo sapiens
acatataaatgcttccagattttaaagtggctt

SEQ ID NO: 44583 - DNA, 33 bp, Homo sapiens
gcagtacatacagcaaatcgccaaatgaaaata

SEQ ID NO: 44584 - DNA, 33 bp, Homo sapiens
ttatatggttgaattgaatgagagtttatatgg

SEQ ID NO: 44585 - DNA, 33 bp, Homo sapiens
ctggagtatttcttggaatttccttcaaccact

SEQ ID NO: 44586 - DNA, 33 bp, Homo sapiens
agattgtggttgtagaaaaggaagaattcacag

SEQ ID NO: 44587 - DNA, 33 bp, Homo sapiens
gccagtctacactgccaaagtgtttcacttagc

SEQ ID NO: 44588 - DNA, 33 bp, Homo sapiens
ttcattaaaccccagaagacctctatctccaat

SEQ ID NO: 44589 - DNA, 33 bp, Homo sapiens
taagtcacttaatgtcccaaagctcatattttt

SEQ ID NO: 44590 - DNA, 51 bp, Homo sapiens
tctctggcctaagttctaagagaaaaatgattgtgctataagctagggact

SEQ ID NO: 44591 - DNA, 33 bp, Homo sapiens
agctaaaatgtgtttgcacgtatgactgtggat

SEQ ID NO: 44592 - DNA, 33 bp, Homo sapiens
ataaggctaagagagacagactgaaaggttaga

SEQ ID NO: 44593 - DNA, 33 bp, Homo sapiens
tcatttgataaaagggccatgctactttaaaca

SEQ ID NO: 44594 - DNA, 33 bp, Homo sapiens
gttttgcctcccttcaaatctatccttcgtgtt

SEQ ID NO: 44595 - DNA, 33 bp, Homo sapiens
tatatctgattgcagcagcaaagggctatcccc

SEQ ID NO: 44596 - DNA, 33 bp, Homo sapiens
cgtcgtgtgatttttcacatgcttcctggtaga

SEQ ID NO: 44597 - DNA, 33 bp, Homo sapiens
gaagccaataatacatcaaggcccatgaaaaag

SEQ ID NO: 44598 - DNA, 33 bp, Homo sapiens
ttttctcctcagctcactcacgggcaaatacaa

SEQ ID NO: 44599 - DNA, 33 bp, Homo sapiens
agtcaggcaagaatgaagtaactcccatgctga

SEQ ID NO: 44600 - DNA, 33 bp, Homo sapiens
tcaacaggatgatctacgctcttttgattagag

SEQ ID NO: 44601 - DNA, 33 bp, Homo sapiens
atactttggttatgtacagaaaatggaatgtgt

SEQ ID NO: 44602 - DNA, 33 bp, Homo sapiens
gattgatttctcaccaaaatggaaagagcaact

SEQ ID NO: 44603 - DNA, 33 bp, Homo sapiens
caggccagacttgtgaaaggaaagtatttatgc

SEQ ID NO: 44604 - DNA, 33 bp, Homo sapiens
cttactttcctctaagacaatctgtgaaccaca

SEQ ID NO: 44605 - DNA, 33 bp, Homo sapiens
cacctgtaatccgtaaatgaatccaacctggaa

SEQ ID NO: 44606 - DNA, 33 bp, Homo sapiens
agctgttgtgtagtctcaatgatttgttccatt

SEQ ID NO: 44607 - DNA, 33 bp, Homo sapiens
acaggatctcctaaggaagctttcaaattgcaa

SEQ ID NO: 44608 - DNA, 33 bp, Homo sapiens
cccgtcagatggagaacgtgaccatgctttcct

SEQ ID NO: 44609 - DNA, 33 bp, Homo sapiens
tttgagtacacataatcagttctcgaggaaagg

SEQ ID NO: 44610 - DNA, 33 bp, Homo sapiens
tcttgaaagctgatttaaaaacacacacccact

SEQ ID NO: 44611 - DNA, 33 bp, Homo sapiens
actctattcaagagcaagacgttgttgtgcacc

SEQ ID NO: 44612 - DNA, 33 bp, Homo sapiens
gttttctcatttggagacctgagataaaatgta

SEQ ID NO: 44613 - DNA, 33 bp, Homo sapiens
actcatgcagtcaaacgcccttctgggttccag

SEQ ID NO: 44614 - DNA, 33 bp, Homo sapiens
ggtatggttgctgatacaaactcaaaatacaaa

SEQ ID NO: 44615 - DNA, 51 bp, Homo sapiens
aaaaaatttctcagtgttgttttctcacccactgttgtgatgatgattcat

SEQ ID NO: 44616 - DNA, 33 bp, Homo sapiens
tggctataaaagtcaaaatcaacaatgcactat

SEQ ID NO: 44617 - DNA, 33 bp, Homo sapiens
ctttaatattcactgaaggcaatagtaatttct

SEQ ID NO: 44618 - DNA, 33 bp, Homo sapiens
atatctgttgttgccccgctagactttatacaa

SEQ ID NO: 44619 - DNA, 33 bp, Homo sapiens
ttttgtttaaacataaaggcaaagaggaacttg

SEQ ID NO: 44620 - DNA, 51 bp, Homo sapiens
atcatcccccaatcctcacaaaaaagtaagtctaactataaaacatagacc

SEQ ID NO: 44621 - DNA, 33 bp, Homo sapiens
ctataaataataaaaaattgatggcactgttta

SEQ ID NO: 44622 - DNA, 51 bp, Homo sapiens
aaaagggggctacatttgaggcatgcacaatactctgatcaagatttcctg

SEQ ID NO: 44623 - DNA, 33 bp, Homo sapiens
actgtttctctccccaaatgcattattattagt

SEQ ID NO: 44624 - DNA, 51 bp, Homo sapiens
tttatgaagaaatggactttagccacgaccttaggctacgtgtctttagtc

SEQ ID NO: 44625 - DNA, 33 bp, Homo sapiens
tttcatgaagatcatacacttgccaagtggcag

SEQ ID NO: 44626 - DNA, 33 bp, Homo sapiens
ttggtattttgattctcactaggctcccctgca

SEQ ID NO: 44627 - DNA, 51 bp, Homo sapiens
ttttggagctgggatcctgggtccaaaggaaaaataatgagaacattaaga

SEQ ID NO: 44628 - DNA, 33 bp, Homo sapiens
catacattagttccaactcccagttctaccact

SEQ ID NO: 44629 - DNA, 33 bp, Homo sapiens
cttttttcacaatttcacagatactgactcatt

SEQ ID NO: 44630 - DNA, 33 bp, Homo sapiens
tgcaacctcttggaacaatgacggatccaggca

SEQ ID NO: 44631 - DNA, 33 bp, Homo sapiens
ttctaaagggatctacaggtgaagctatctaaa

SEQ ID NO: 44632 - DNA, 33 bp, Homo sapiens
acctatttataggataactgtccatggattatc

SEQ ID NO: 44633 - DNA, 33 bp, Homo sapiens
ttgtatgcttacttacaatggctttgcatagca

SEQ ID NO: 44634 - DNA, 33 bp, Homo sapiens
tttagataagtatgggcaaaaacgtatcaacac

SEQ ID NO: 44635 - DNA, 33 bp, Homo sapiens
attaatgttttaatcaagaagtggaacagaaac

SEQ ID NO: 44636 - DNA, 33 bp, Homo sapiens
cagtctgaaaactaaaatgatgccagtgaagca

SEQ ID NO: 44637 - DNA, 33 bp, Homo sapiens
ttgaacatattctgacacatgaatctgggacag

SEQ ID NO: 44638 - DNA, 33 bp, Homo sapiens
tgcagagactgaaaaactgttggccaagtaatt

SEQ ID NO: 44639 - DNA, 33 bp, Homo sapiens
gacaaagagaggacaacgcagtgaagaaataaa

SEQ ID NO: 44640 - DNA, 33 bp, Homo sapiens
gcaacttcaagagacaatgtattatcagctatg

SEQ ID NO: 44641 - DNA, 33 bp, Homo sapiens
ccaaagcaagggatcacgaagcaggcctcccac

SEQ ID NO: 44642 - DNA, 33 bp, Homo sapiens
gagttccattttgtgccaggacagttctgccaa

SEQ ID NO: 44643 - DNA, 33 bp, Homo sapiens
atgttttgcaaggatccatattatctttaaagc

SEQ ID NO: 44644 - DNA, 33 bp, Homo sapiens
ctatcgtttactgacaatacaaatcctgaataa

SEQ ID NO: 44645 - DNA, 51 bp, Homo sapiens
cttaattatatctaggtctaatacaagcatggctagagtttaagtgggcaa

SEQ ID NO: 44646 - DNA, 33 bp, Homo sapiens
tccacagttacatctcgagtttatcatgtgttc

SEQ ID NO: 44647 - DNA, 33 bp, Homo sapiens
ctataattttgtaggacgcatagttggccaata

SEQ ID NO: 44648 - DNA, 33 bp, Homo sapiens
tcactgttggtgggaaagtaggttgattccatg

SEQ ID NO: 44649 - DNA, 33 bp, Homo sapiens
tgtgtgtgtgttttccgctggcctgctccctcc

SEQ ID NO: 44650 - DNA, 33 bp, Homo sapiens
tgatagttgcctaataacttcctgtaaaaactc

SEQ ID NO: 44651 - DNA, 33 bp, Homo sapiens
cttaccctttgagcaaatacagtattcatactt

SEQ ID NO: 44652 - DNA, 33 bp, Homo sapiens
tgtctctgtctctcaactagataattcctactg

SEQ ID NO: 44653 - DNA, 33 bp, Homo sapiens
taatacaactcacagaagctttactccaaatga

SEQ ID NO: 44654 - DNA, 33 bp, Homo sapiens
gactcctaacataacaaccatctgcagccatag

SEQ ID NO: 44655 - DNA, 51 bp, Homo sapiens
actgaggttggtcagagagattataccgtccttgatttaaaataataacca

SEQ ID NO: 44656 - DNA, 33 bp, Homo sapiens
tccatttccatacctcccaggatacaaccagac

SEQ ID NO: 44657 - DNA, 33 bp, Homo sapiens
ttaggcaaagactttacggtaaagattttctaa

SEQ ID NO: 44658 - DNA, 33 bp, Homo sapiens
atttttagatattaacccttgatcatcggtatg

SEQ ID NO: 44659 - DNA, 33 bp, Homo sapiens
gacactattcccctgcacatggtcatatcttgt

SEQ ID NO: 44660 - DNA, 33 bp, Homo sapiens
tttttcacagcttacactgaaactttggcttca

SEQ ID NO: 44661 - DNA, 51 bp, Homo sapiens
gcctttaggaggtccatccttccaacgcctgagcaataatttcagaagata

SEQ ID NO: 44662 - DNA, 33 bp, Homo sapiens
aaatttatgaaagaaagccatttgggggtgtga

SEQ ID NO: 44663 - DNA, 33 bp, Homo sapiens
tggtccttaaaaatgaagaagtttgaatgagat

SEQ ID NO: 44664 - DNA, 51 bp, Homo sapiens
tattgtttcagagtgctatcaagaacgtatatgaattaggagtaattgtta

SEQ ID NO: 44665 - DNA, 33 bp, Homo sapiens
aatatgagatgaattacagtgcaccttgccggg

SEQ ID NO: 44666 - DNA, 33 bp, Homo sapiens
aaaatgtgaaattagacgcctggaatataccag

SEQ ID NO: 44667 - DNA, 33 bp, Homo sapiens
gtcattagtgtcttcagaaaaactgagattaaa

SEQ ID NO: 44668 - DNA, 33 bp, Homo sapiens
cctgggtgatgctttgaaaaaaatctgtttacc

SEQ ID NO: 44669 - DNA, 33 bp, Homo sapiens
ttaaatgaaatgataaatgagatgatacaggta

SEQ ID NO: 44670 - DNA, 51 bp, Homo sapiens
gcacaagtgaaactgccattgcaaaatttactactgagacagtgaaagtga

SEQ ID NO: 44671 - DNA, 33 bp, Homo sapiens
agatagttttttgagagcatgaaagaccaaaaa

SEQ ID NO: 44672 - DNA, 33 bp, Homo sapiens
acgtaaaatgctatgcaactaagccaaagtctt

SEQ ID NO: 44673 - DNA, 33 bp, Homo sapiens
atatagtaggagttaacaaatgatgatgtacta

SEQ ID NO: 44674 - DNA, 33 bp, Homo sapiens
tcaaaacctgagtataagtactgtaggagctaa

SEQ ID NO: 44675 - DNA, 51 bp, Homo sapiens
gaataattgggcaaagtttcatttaaaacctgatggatgatctgtaaaaga

SEQ ID NO: 44676 - DNA, 33 bp, Homo sapiens
ttttctttacatttataagtggtatcaagatag

SEQ ID NO: 44677 - DNA, 51 bp, Homo sapiens
caagcttctcttttcccttaccttacaaacatgactccttcttttctcttc

SEQ ID NO: 44678 - DNA, 33 bp, Homo sapiens
tcattatgttaggtgaaataagatagagaacaa

SEQ ID NO: 44679 - DNA, 51 bp, Homo sapiens
ctctggaaagcaaattcactacaaaagattgaagcaaaaaggaagagttac

SEQ ID NO: 44680 - DNA, 33 bp, Homo sapiens
actctttcctagtgtggacattaatcaaagttt

SEQ ID NO: 44681 - DNA, 33 bp, Homo sapiens
aaatgattgactccccaggattgattaacccag

SEQ ID NO: 44682 - DNA, 33 bp, Homo sapiens
tgcagaggtctgattacggtatggtgtcagttc

SEQ ID NO: 44683 - DNA, 33 bp, Homo sapiens
cccagtggccatgaaccaccacaaggctgtcat

SEQ ID NO: 44684 - DNA, 33 bp, Homo sapiens
ggtcatgacagctttccgaaaatacaccaatgc

SEQ ID NO: 44685 - DNA, 33 bp, Homo sapiens
cagaagactgcaaaacaatgtagtaataatgca

SEQ ID NO: 44686 - DNA, 51 bp, Homo sapiens
tttaaactgttagtcaggcctaaaaagttgaaaatgttcattctgaaatta

SEQ ID NO: 44687 - DNA, 33 bp, Homo sapiens
acatgatgctactggaagaataatcagaagtca

SEQ ID NO: 44688 - DNA, 51 bp, Homo sapiens
tagaaatttctgcataatctgccacataattaaaagtaggtataaatatga

SEQ ID NO: 44689 - DNA, 51 bp, Homo sapiens
tgaaaatatttggatataattgaaactaaaaaggaaatcccatgaccactg

SEQ ID NO: 44690 - DNA, 33 bp, Homo sapiens
acatagagacaatctaaaagaactaatgtttct

SEQ ID NO: 44691 - DNA, 33 bp, Homo sapiens
tagctgctagagtgaaagaaaaaccttgtggca

SEQ ID NO: 44692 - DNA, 51 bp, Homo sapiens
ttttttttacttcctctgaatttgccgatttcattcatttctcaaactccc

SEQ ID NO: 44693 - DNA, 33 bp, Homo sapiens
tctatcagtaacttaaaaaagaggtgcaggaag

SEQ ID NO: 44694 - DNA, 33 bp, Homo sapiens
aaaatacacaaacacaaatttatttagctcata

SEQ ID NO: 44695 - DNA, 33 bp, Homo sapiens
ggaggaggcagattgacggtgacgggtacctgc

SEQ ID NO: 44696 - DNA, 33 bp, Homo sapiens
atactgcacatttaccacaaccttggtgttatt

SEQ ID NO: 44697 - DNA, 33 bp, Homo sapiens
tcctgggagataatagaataaactcatggagga

SEQ ID NO: 44698 - DNA, 33 bp, Homo sapiens
tatttgaaccactctgaaacaagaagaaaattg

SEQ ID NO: 44699 - DNA, 33 bp, Homo sapiens
gtcagcaacaagctaaccaatgggactgaacaa

SEQ ID NO: 44700 - DNA, 33 bp, Homo sapiens
agtctgcaggacaggaaaacaatctaccaagat

SEQ ID NO: 44701 - DNA, 33 bp, Homo sapiens
gttagattggcaggaacggccctgagtatttat

SEQ ID NO: 44702 - DNA, 33 bp, Homo sapiens
gccagctccttgacggaattctttcatgaacag

SEQ ID NO: 44703 - DNA, 33 bp, Homo sapiens
tgaataacatggtaaaatcttggttcgataagt

SEQ ID NO: 44704 - DNA, 33 bp, Homo sapiens
aaacatctactccagccacttaggtgtactgaa

SEQ ID NO: 44705 - DNA, 33 bp, Homo sapiens
aaatgtgaacaatggaatattagtgccaggtca

SEQ ID NO: 44706 - DNA, 33 bp, Homo sapiens
actcagacatactcatcacacaatgaaatgaag

SEQ ID NO: 44707 - DNA, 33 bp, Homo sapiens
agtctgttttcaaataggttagaggcaatcagg

SEQ ID NO: 44708 - DNA, 33 bp, Homo sapiens
ccccacagctccttgacgaattcttatatggac

SEQ ID NO: 44709 - DNA, 51 bp, Homo sapiens
tgcatcttctagaagactgtgaagacattgcactgggccaaccatacttgt

SEQ ID NO: 44710 - DNA, 33 bp, Homo sapiens
ggagcaatctatactcccatcaccaggtttttt

SEQ ID NO: 44711 - DNA, 33 bp, Homo sapiens
taacataaagttttcaaggttcatttatgttgt

SEQ ID NO: 44712 - DNA, 33 bp, Homo sapiens
gagctaggcactggacaaaggtctgtctatctc

SEQ ID NO: 44713 - DNA, 33 bp, Homo sapiens
caaacaggatggacaaaaagaacctcaaatatc

SEQ ID NO: 44714 - DNA, 33 bp, Homo sapiens
ttctgtacccagtacaaccaacaagcaggactc

SEQ ID NO: 44715 - DNA, 51 bp, Homo sapiens
ccaggcaaaacttgtatagggctgaccctggaagcgtgcctgtagataagg

SEQ ID NO: 44716 - DNA, 33 bp, Homo sapiens
tacactgttgtaagaaattcccatagaacgcag

SEQ ID NO: 44717 - DNA, 33 bp, Homo sapiens
gacaaaaggcagccacaaatgaaagttgaagtc

SEQ ID NO: 44718 - DNA, 33 bp, Homo sapiens
agaatgcctcggcacagccgctcactatggtca

SEQ ID NO: 44719 - DNA, 33 bp, Homo sapiens
ctctggctagccgtcagatttggaaagcattca

SEQ ID NO: 44720 - DNA, 33 bp, Homo sapiens
aagatctttattttgtgaagcctctgtagtagg

SEQ ID NO: 44721 - DNA, 33 bp, Homo sapiens
ctgaagttttttccagaactggcttatcatgag

SEQ ID NO: 44722 - DNA, 33 bp, Homo sapiens
tgtgaagagtagaaagaattttgttgggcagag

SEQ ID NO: 44723 - DNA, 33 bp, Homo sapiens
atttgacagatgaggaaactaaagtgaaggtga

SEQ ID NO: 44724 - DNA, 33 bp, Homo sapiens
ttgaccctgcagttgcaccctagcaaactgaaa

SEQ ID NO: 44725 - DNA, 33 bp, Homo sapiens
ctaataatacggcacacgatctatgtcggcttt

SEQ ID NO: 44726 - DNA, 33 bp, Homo sapiens
ccacctggcccccacaaccaatgtgtttcaggg

SEQ ID NO: 44727 - DNA, 33 bp, Homo sapiens
cctaaagacaagaccacgcctcttgaggaccaa

SEQ ID NO: 44728 - DNA, 51 bp, Homo sapiens
accctcattataccttgcctggctaaactttattctcttcttgtcttctga

SEQ ID NO: 44729 - DNA, 33 bp, Homo sapiens
gcctacctgagatcacaaacatatattctccag

SEQ ID NO: 44730 - DNA, 33 bp, Homo sapiens
aagacaccagtgaaggccatgttcgccataaga

SEQ ID NO: 44731 - DNA, 33 bp, Homo sapiens
gggtggggatgttacacactgttaggagttgat

SEQ ID NO: 44732 - DNA, 51 bp, Homo sapiens
tgataaaaacaaagaactggatcaaaactggaaaggagaacgctcagagga

SEQ ID NO: 44733 - DNA, 33 bp, Homo sapiens
tattaatactcaccaaaattttcttccaatgta

SEQ ID NO: 44734 - DNA, 33 bp, Homo sapiens
tgtgcacacatcttccgctgctttcccagctca

SEQ ID NO: 44735 - DNA, 33 bp, Homo sapiens
tgcctttcctgacataggtatgacttgaagaaa

SEQ ID NO: 44736 - DNA, 33 bp, Homo sapiens
aaagagagagcaactacgtagagaaggtcatgg

SEQ ID NO: 44737 - DNA, 33 bp, Homo sapiens
ggccacccggcgcaaccgactttctgctctctg

SEQ ID NO: 44738 - DNA, 33 bp, Homo sapiens
ctcgtgcccctagaaccgttaaggcatgagaga

SEQ ID NO: 44739 - DNA, 33 bp, Homo sapiens
gggcgcagtcaggtgaaaaaggacgtgcctaaa

SEQ ID NO: 44740 - DNA, 33 bp, Homo sapiens
gttaactaaatatacaactccttaatgaagaca

SEQ ID NO: 44741 - DNA, 33 bp, Homo sapiens
tattactgtatatagaatcaatgcacaggttat

SEQ ID NO: 44742 - DNA, 51 bp, Homo sapiens
gatggtttggactaatctgactctcgcgtgcatgttgttttcatcctctac

SEQ ID NO: 44743 - DNA, 33 bp, Homo sapiens
ttcctgcattccacaaatgttccctctgggttc

SEQ ID NO: 44744 - DNA, 33 bp, Homo sapiens
gaagattatgttaataaaaggtcaggtatgtgc

SEQ ID NO: 44745 - DNA, 33 bp, Homo sapiens
aaacaatgccttttcacgttgatgatcacttta

SEQ ID NO: 44746 - DNA, 33 bp, Homo sapiens
tgctttagctctttgcacatatttaagactttt

SEQ ID NO: 44747 - DNA, 33 bp, Homo sapiens
tattcatgagagtataaaaatttatgtgattac

SEQ ID NO: 44748 - DNA, 33 bp, Homo sapiens
gctttattacatgaccagagtgtagaaggcagt

SEQ ID NO: 44749 - DNA, 33 bp, Homo sapiens
ccgtattcccattcaaccacaggaagccccata

SEQ ID NO: 44750 - DNA, 33 bp, Homo sapiens
ctgaggactttgagaagactcgacaagccttca

SEQ ID NO: 44751 - DNA, 33 bp, Homo sapiens
gtagaaagcatttcccagaccttcaacataagc

SEQ ID NO: 44752 - DNA, 33 bp, Homo sapiens
ctccagccagattaaactgctaaagcacagtcc

SEQ ID NO: 44753 - DNA, 33 bp, Homo sapiens
ccatcaacatcagacaaaaagaccagatgacat

SEQ ID NO: 44754 - DNA, 33 bp, Homo sapiens
agcaatttcaaacttacggaaaaggctatgaaa

SEQ ID NO: 44755 - DNA, 33 bp, Homo sapiens
aaaaaatatttgctcaatacctgtagtcagcat

SEQ ID NO: 44756 - DNA, 51 bp, Homo sapiens
cacatggaagtgaaaggataataaactcaagtggatgacagccatacatta

SEQ ID NO: 44757 - DNA, 33 bp, Homo sapiens
attgtctggtgttttacgtgtagcaggcttcca

SEQ ID NO: 44758 - DNA, 33 bp, Homo sapiens
agcagaagtcttcagaaaccaagcccaccctga

SEQ ID NO: 44759 - DNA, 33 bp, Homo sapiens
ttctctttctcaagggcactatgctgcacacct

SEQ ID NO: 44760 - DNA, 51 bp, Homo sapiens
agaagaaccacctgccaaatctcaccgtaagtcactgcttaatgcagggct

SEQ ID NO: 44761 - DNA, 51 bp, Homo sapiens
aaatcctaacatcttcggtagcatacaagaccgttcctgagcctggcccca

SEQ ID NO: 44762 - DNA, 51 bp, Homo sapiens
caggaggcagaaactgttaccagcactagcggatgtgaaaaatggggcagt

SEQ ID NO: 44763 - DNA, 33 bp, Homo sapiens
catcatcagatgctcaacagctttccacaatgt

SEQ ID NO: 44764 - DNA, 33 bp, Homo sapiens
tgcaccttctcaactacgtctgtttattttcag

SEQ ID NO: 44765 - DNA, 33 bp, Homo sapiens
catctcattaacgacaaatccaagatgtgccag

SEQ ID NO: 44766 - DNA, 33 bp, Homo sapiens
agttcttctaatccaacggttcatttgtcgtat

SEQ ID NO: 44767 - DNA, 33 bp, Homo sapiens
accaagatcagagaaggatcgagtccatgtgca

SEQ ID NO: 44768 - DNA, 33 bp, Homo sapiens
ggataacctaattgcccgatttaatcattatac

SEQ ID NO: 44769 - DNA, 33 bp, Homo sapiens
gtgttcttgcccaaaagtcacaacctccatgta

SEQ ID NO: 44770 - DNA, 33 bp, Homo sapiens
cccaggaaaggctgaaaagaagcatggaggttg

SEQ ID NO: 44771 - DNA, 51 bp, Homo sapiens
gcaagaccaaacatcaaatttatgacgaagtgtggagagaagaattgtgaa

SEQ ID NO: 44772 - DNA, 33 bp, Homo sapiens
ggctttaaattttccaatcccaaaaatgtataa

SEQ ID NO: 44773 - DNA, 51 bp, Homo sapiens
aaacaaacttatccctgaactaaaaactgggcatggactcactgaccctga

SEQ ID NO: 44774 - DNA, 51 bp, Homo sapiens
cagtttcaggctaggttcttgccctatatgtgtgacttcaggttgggcttt

SEQ ID NO: 44775 - DNA, 33 bp, Homo sapiens
agagtgcaggttagaacgcattggtatggtcct

SEQ ID NO: 44776 - DNA, 33 bp, Homo sapiens
gactcttatgaataaagctacgatgaatagaca

SEQ ID NO: 44777 - DNA, 33 bp, Homo sapiens
aattcatctaactagcaaaaactcagtcataca

SEQ ID NO: 44778 - DNA, 33 bp, Homo sapiens
cataccctctgtctccgcattagggatactctc

SEQ ID NO: 44779 - DNA, 33 bp, Homo sapiens
tccttcttagatgcggaacaagaaaacacaact

SEQ ID NO: 44780 - DNA, 33 bp, Homo sapiens
ttgggcatcctcttaacgagttagcaattaaat

SEQ ID NO: 44781 - DNA, 33 bp, Homo sapiens
tgcctttcaagcttccagattagttattaaaaa

SEQ ID NO: 44782 - DNA, 33 bp, Homo sapiens
gtcttgcgcttctggacgaatgcagctcatgat

SEQ ID NO: 44783 - DNA, 33 bp, Homo sapiens
tataaaatatgatcacaaccatgtggataataa

SEQ ID NO: 44784 - DNA, 33 bp, Homo sapiens
ggtcaccccaacctagaatgtaaatggactttc

SEQ ID NO: 44785 - DNA, 33 bp, Homo sapiens
gctgtcctaccaggagacctgcttctacacaaa

SEQ ID NO: 44786 - DNA, 33 bp, Homo sapiens
cttatgtgtctctggcaatactctttgttctga

SEQ ID NO: 44787 - DNA, 51 bp, Homo sapiens
aaacttgcgtggaggtcatcgaataaggtacctgaccacagcgtggtaaac

SEQ ID NO: 44788 - DNA, 33 bp, Homo sapiens
cagccatttgcagtggaatttcctacctgagcc

SEQ ID NO: 44789 - DNA, 33 bp, Homo sapiens
tttgttttgcactgcacagttgtttgggagaca

SEQ ID NO: 44790 - DNA, 33 bp, Homo sapiens
ctggaaagacagagtcactaacaactgaaaaat

SEQ ID NO: 44791 - DNA, 33 bp, Homo sapiens
tgagcttattcagtgaagtggtacatattatgt

SEQ ID NO: 44792 - DNA, 33 bp, Homo sapiens
taacaagtgaaaaaaaattgcctgaggatgtgt

SEQ ID NO: 44793 - DNA, 33 bp, Homo sapiens
aatccccgtatgccaaagttgctaagatctgtg

SEQ ID NO: 44794 - DNA, 33 bp, Homo sapiens
tttgtctttacagtgacgatggaagaatgtaca

SEQ ID NO: 44795 - DNA, 33 bp, Homo sapiens
tgttccctcagtgaacacccaaaattcaaaata

SEQ ID NO: 44796 - DNA, 33 bp, Homo sapiens
tgttaactgcttttccccccaaatatgtatcac

SEQ ID NO: 44797 - DNA, 33 bp, Homo sapiens
ttttaaacaaaaatgacgactggtgacagaaaa

SEQ ID NO: 44798 - DNA, 51 bp, Homo sapiens
gtgtttagttaccaggcaagcaggaagccacaatggtgactcagtgtgtga

SEQ ID NO: 44799 - DNA, 33 bp, Homo sapiens
ttggtataataaggacactccaaattcataaaa

SEQ ID NO: 44800 - DNA, 33 bp, Homo sapiens
tctggagagttaaagacggtgatcaataatttc

SEQ ID NO: 44801 - DNA, 33 bp, Homo sapiens
gagttgcaggcatccaagctgtaagtagtagca

SEQ ID NO: 44802 - DNA, 33 bp, Homo sapiens
tcagagttctctcaaacacatgtcagccaacaa

SEQ ID NO: 44803 - DNA, 33 bp, Homo sapiens
tatgcaataaacacttcaactataggccagttc

SEQ ID NO: 44804 - DNA, 33 bp, Homo sapiens
tcatgagaaagtgaaccagaaggagtgattacg

SEQ ID NO: 44805 - DNA, 33 bp, Homo sapiens
aaccacggcacatagcaaagtctaccattttct

SEQ ID NO: 44806 - DNA, 33 bp, Homo sapiens
tgaagactgagcaatacggcggtcacttgtgcc

SEQ ID NO: 44807 - DNA, 33 bp, Homo sapiens
tgctgttttggcattaaggaacaaaaatcttct

SEQ ID NO: 44808 - DNA, 33 bp, Homo sapiens
cacattttacgctgacaaacccaatctaagatg

SEQ ID NO: 44809 - DNA, 33 bp, Homo sapiens
gtcatttcagtggcaaagagaagaacagacatc

SEQ ID NO: 44810 - DNA, 51 bp, Homo sapiens
cagcccaaggaactaaggcatacagacattaccatggcccaaactgctttt

SEQ ID NO: 44811 - DNA, 33 bp, Homo sapiens
gcttgggtgatgggaaagtgatgcaaatgagaa

SEQ ID NO: 44812 - DNA, 33 bp, Homo sapiens
cactgcagctgcttccagaaaagatgggatatt

SEQ ID NO: 44813 - DNA, 33 bp, Homo sapiens
tcaatctactttgcaaaatttggaggctatttc

SEQ ID NO: 44814 - DNA, 33 bp, Homo sapiens
gatatttggttttctcacagacattaaacccaa

SEQ ID NO: 44815 - DNA, 33 bp, Homo sapiens
tctaaatagcctgttacagaatttcagcgaagc

SEQ ID NO: 44816 - DNA, 33 bp, Homo sapiens
tttttatttgtgtgacagatataacaaagggta

SEQ ID NO: 44817 - DNA, 33 bp, Homo sapiens
cagacatacacggtaacgggaatgtcacagcta

SEQ ID NO: 44818 - DNA, 51 bp, Homo sapiens
gagaatagtgttaactagtatcttgcagaaaataatggcattgtatctatt

SEQ ID NO: 44819 - DNA, 33 bp, Homo sapiens
ttatgtaaatataaacaaaattgtcatggctta

SEQ ID NO: 44820 - DNA, 33 bp, Homo sapiens
aaccttggtgggcaaaactccttgcctgggaaa

SEQ ID NO: 44821 - DNA, 33 bp, Homo sapiens
tcactgtacctactcaaagagatgcttggagaa

SEQ ID NO: 44822 - DNA, 51 bp, Homo sapiens
ttaaaaagcataacaccacgtgcatcataagctctcaataaatacaggctg

SEQ ID NO: 44823 - DNA, 33 bp, Homo sapiens
ggccagacatcaaacccctacttcggcctattg

SEQ ID NO: 44824 - DNA, 33 bp, Homo sapiens
ttcagtatcattgatgcaactaccttatgactc

SEQ ID NO: 44825 - DNA, 33 bp, Homo sapiens
tgcatcgatgtactaaacacttcaataatcatc

SEQ ID NO: 44826 - DNA, 33 bp, Homo sapiens
cctgacaacttgttctaactgtagaaactaggg

SEQ ID NO: 44827 - DNA, 33 bp, Homo sapiens
actattttctgttcctcagctttcagactcaga

SEQ ID NO: 44828 - DNA, 33 bp, Homo sapiens
aaccatcacaatagagaagtcttaaattccgtc

SEQ ID NO: 44829 - DNA, 33 bp, Homo sapiens
gacttcatgtggacaacggctaacagtgccatt

SEQ ID NO: 44830 - DNA, 33 bp, Homo sapiens
aaaaaaaagtccaccactgaatacatcagaaca

SEQ ID NO: 44831 - DNA, 33 bp, Homo sapiens
attttcttatactgcaacaaagctagcacattt

SEQ ID NO: 44832 - DNA, 33 bp, Homo sapiens
gttttccctttgtgtgaaataatgtaagtaagt

SEQ ID NO: 44833 - DNA, 33 bp, Homo sapiens
actcaggtaaaactaccgctagcctggtaaagt

SEQ ID NO: 44834 - DNA, 33 bp, Homo sapiens
taattaatatgtgaaaagaacaacattaggttt

SEQ ID NO: 44835 - DNA, 33 bp, Homo sapiens
tgttctggccagtgggcatatcaggtaaaaagc

SEQ ID NO: 44836 - DNA, 33 bp, Homo sapiens
gagactgaagcagaaacataatttgagcccagg

SEQ ID NO: 44837 - DNA, 33 bp, Homo sapiens
ggtatgttgccaaaaagctcagtttaaaagagt

SEQ ID NO: 44838 - DNA, 33 bp, Homo sapiens
caagcccaactgctaaagacgagggaaagcctc

SEQ ID NO: 44839 - DNA, 33 bp, Homo sapiens
gtgctctttaacccacaaactgcaacacaaatc

SEQ ID NO: 44840 - DNA, 51 bp, Homo sapiens
tgttttgcagccatgaaaaatgacacctctgaaagatatttaacaacatga

SEQ ID NO: 44841 - DNA, 33 bp, Homo sapiens
ttctgcctgaaaattccagtatttcctctgtac

SEQ ID NO: 44842 - DNA, 33 bp, Homo sapiens
atagcatagagcctaacacatcaccagatggca

SEQ ID NO: 44843 - DNA, 33 bp, Homo sapiens
agaaaagagagggtcaatcttcctttttataga

SEQ ID NO: 44844 - DNA, 51 bp, Homo sapiens
ctttcaaaagcatcatggaattaggaaatactaaactggaaagggttgttt

SEQ ID NO: 44845 - DNA, 33 bp, Homo sapiens
gagaggaaattaccaacctgcataatggagaca

SEQ ID NO: 44846 - DNA, 33 bp, Homo sapiens
gcatagcatgaggtcaaacagcaatatgcagag

SEQ ID NO: 44847 - DNA, 33 bp, Homo sapiens
tctttgctgcagtcaaactctacttgttacatt

SEQ ID NO: 44848 - DNA, 33 bp, Homo sapiens
cagggccctgttcaaccatcacttcctccctca

SEQ ID NO: 44849 - DNA, 33 bp, Homo sapiens
agcacattcttggaaaggcactttgtttgtcct

SEQ ID NO: 44850 - DNA, 33 bp, Homo sapiens
cattcactggtaaatacgcacattgtgaccttt

SEQ ID NO: 44851 - DNA, 33 bp, Homo sapiens
tggcttgctttgaacaaccccacgtggccccac

SEQ ID NO: 44852 - DNA, 51 bp, Homo sapiens
gtttcatatttgcattgctcatgaacgtaaacaaaatgtcgatatgtgtga

SEQ ID NO: 44853 - DNA, 33 bp, Homo sapiens
agactcttcttggaccaagacctcatgacactt

SEQ ID NO: 44854 - DNA, 33 bp, Homo sapiens
aggtacgtaatggaaaataaactagagctggct

SEQ ID NO: 44855 - DNA, 33 bp, Homo sapiens
gggacttatgtatgccgcactgactgaagtaaa

SEQ ID NO: 44856 - DNA, 33 bp, Homo sapiens
ctagttttcagtctcacgatttccgctctctgt

SEQ ID NO: 44857 - DNA, 33 bp, Homo sapiens
gaggaagatcccaaacgggatggaggcaaagtg

SEQ ID NO: 44858 - DNA, 33 bp, Homo sapiens
ctttaagtgattctgaagagaaactggttagga

SEQ ID NO: 44859 - DNA, 33 bp, Homo sapiens
tgtaaaaagccagatactaagtagttgaggctt

SEQ ID NO: 44860 - DNA, 51 bp, Homo sapiens
attgtctggctttagtagatgctcacctcttgatgatcacacaatagagag

SEQ ID NO: 44861 - DNA, 51 bp, Homo sapiens
atagggctgataagaaagtcatcctcaatgttctattgcaccatatgcatc

SEQ ID NO: 44862 - DNA, 33 bp, Homo sapiens
tcagctctccttttaaatacaggtgactgtagc

SEQ ID NO: 44863 - DNA, 33 bp, Homo sapiens
aggcttttgagaggtcaaagaggctccttgtca

SEQ ID NO: 44864 - DNA, 33 bp, Homo sapiens
tacagttcggacattcaagcatcgcgatttctc

SEQ ID NO: 44865 - DNA, 33 bp, Homo sapiens
caagaggaaagtctaaaggcatcacagaatctc

SEQ ID NO: 44866 - DNA, 33 bp, Homo sapiens
cccagatgtgattaacacaagttccaaagtaag

SEQ ID NO: 44867 - DNA, 33 bp, Homo sapiens
cacatattacaaaccaatgaggaaggaagtatt

SEQ ID NO: 44868 - DNA, 33 bp, Homo sapiens
aaggtggtggttctgaagtaatggtaagtgtga

SEQ ID NO: 44869 - DNA, 33 bp, Homo sapiens
cttctcatgagaaaaaataaggtgataagtgct

SEQ ID NO: 44870 - DNA, 33 bp, Homo sapiens
gcattacagaaagaataaactccaagtcgttta

SEQ ID NO: 44871 - DNA, 33 bp, Homo sapiens
gcatggagacaagtgcaaatcactttacatgag

SEQ ID NO: 44872 - DNA, 33 bp, Homo sapiens
acgtactgaatccccgcacaagaaatgcagagt

SEQ ID NO: 44873 - DNA, 33 bp, Homo sapiens
tgtctggtgtgaaccacgggggtttagaggaat

SEQ ID NO: 44874 - DNA, 33 bp, Homo sapiens
ggcttgatgactgtgacagtgaaggagagacaa

SEQ ID NO: 44875 - DNA, 33 bp, Homo sapiens
gacctgaatacagcccagattgctagcagaaac

SEQ ID NO: 44876 - DNA, 33 bp, Homo sapiens
taggtccgatgtgttacagcatttagtgtaaga

SEQ ID NO: 44877 - DNA, 51 bp, Homo sapiens
aggagtgattatgcattggtttatgccaagtaaaaataaagaataagatga

SEQ ID NO: 44878 - DNA, 33 bp, Homo sapiens
aactttgtctgctgaacctaaagaataaggaga

SEQ ID NO: 44879 - DNA, 33 bp, Homo sapiens
caccactttcttccagaccccaaagtcaagtag

SEQ ID NO: 44880 - DNA, 51 bp, Homo sapiens
gtactgggctgccctttggtcagaaaaaatgaaataaaggaagttctccag

SEQ ID NO: 44881 - DNA, 33 bp, Homo sapiens
tgacatagctaatgcaacgtttttcaggcagcc

SEQ ID NO: 44882 - DNA, 33 bp, Homo sapiens
caaagggaatgactgccctgagcttacaaattc

SEQ ID NO: 44883 - DNA, 33 bp, Homo sapiens
taggtttactcataaccgtcagaaattggaaaa

SEQ ID NO: 44884 - DNA, 33 bp, Homo sapiens
gaaaaatcagaatacacaagcctcgctaagttc

SEQ ID NO: 44885 - DNA, 33 bp, Homo sapiens
gattatatatagcagaatagtgcagtggcttaa

SEQ ID NO: 44886 - DNA, 33 bp, Homo sapiens
ggagagcctgttgataccatcatttggtaggca

SEQ ID NO: 44887 - DNA, 51 bp, Homo sapiens
ttaggaaaactagttagcataatgaagaataggaaaggatactggaatgca

SEQ ID NO: 44888 - DNA, 33 bp, Homo sapiens
aagaagctggaaaatacggaaaactgaggaaat

SEQ ID NO: 44889 - DNA, 33 bp, Homo sapiens
atgaaagcagcgtcatgacatcttctaagaatc

SEQ ID NO: 44890 - DNA, 33 bp, Homo sapiens
ttatgaggctttagggaaatgtcaaccctcaaa

SEQ ID NO: 44891 - DNA, 33 bp, Homo sapiens
cttgtgcagaatgggacatgtgaatcactgtgt

SEQ ID NO: 44892 - DNA, 33 bp, Homo sapiens
aagaggggtgttaccagggcattacttatgctt

SEQ ID NO: 44893 - DNA, 33 bp, Homo sapiens
gacagtcaaagcctcactctactcctcactgca

SEQ ID NO: 44894 - DNA, 33 bp, Homo sapiens
agttctatagatgtacacactgaagagatcagt

SEQ ID NO: 44895 - DNA, 33 bp, Homo sapiens
tataccaaaatgctcaatatcattccttttgct

SEQ ID NO: 44896 - DNA, 33 bp, Homo sapiens
acccaggtctctcaaacttcacagctccatgca

SEQ ID NO: 44897 - DNA, 33 bp, Homo sapiens
aaagaatatagaagaaaacatcagtagagaaga

SEQ ID NO: 44898 - DNA, 33 bp, Homo sapiens
tggtaccagcacgtaaaggagtcaagcgcagca

SEQ ID NO: 44899 - DNA, 33 bp, Homo sapiens
ggagatgactgtgatgaaatagtgactaagttc

SEQ ID NO: 44900 - DNA, 33 bp, Homo sapiens
tttaagaaaggtgccacatttgcagaacaggga

SEQ ID NO: 44901 - DNA, 33 bp, Homo sapiens
ggtgaggtgtgtttccaaatctgaaatctcagc

SEQ ID NO: 44902 - DNA, 33 bp, Homo sapiens
acacataaaaacacataaggacaagtaaaactg

SEQ ID NO: 44903 - DNA, 33 bp, Homo sapiens
ttggaccttgaattgcccttaaatcacacatgc

SEQ ID NO: 44904 - DNA, 33 bp, Homo sapiens
gcctagataagaaaagaagtggcagccactgtg

SEQ ID NO: 44905 - DNA, 33 bp, Homo sapiens
tctctctctaatactacagcagaagcaggttac

SEQ ID NO: 44906 - DNA, 33 bp, Homo sapiens
gccaccgctgtagtagcattcggatcatcacct

SEQ ID NO: 44907 - DNA, 33 bp, Homo sapiens
ttccgagtttggtgtcgaattctctcaaatcaa

SEQ ID NO: 44908 - DNA, 33 bp, Homo sapiens
caaaccagattcttagccacagggcaccagtgg

SEQ ID NO: 44909 - DNA, 33 bp, Homo sapiens
ttttaagttgggagataataagtcatcttgttt

SEQ ID NO: 44910 - DNA, 33 bp, Homo sapiens
ttttggtaaaaagcaaagcaactagttacataa

SEQ ID NO: 44911 - DNA, 33 bp, Homo sapiens
tgctaatttttatttaagtgtcacctgatgaaa

SEQ ID NO: 44912 - DNA, 33 bp, Homo sapiens
tcctcatgaatgtccaatgatattacatctgat

SEQ ID NO: 44913 - DNA, 33 bp, Homo sapiens
tgatgtttgggtagaccgagtaaaagctgagaa

SEQ ID NO: 44914 - DNA, 33 bp, Homo sapiens
aactttgttctgtacacggactaaatattgtct

SEQ ID NO: 44915 - DNA, 33 bp, Homo sapiens
gtgacaagtgacaggaagacacagttaaccgtc

SEQ ID NO: 44916 - DNA, 33 bp, Homo sapiens
atttttctttatcttgaagaaaagcaccaagtg

SEQ ID NO: 44917 - DNA, 33 bp, Homo sapiens
actagagcacacccaactagaatgcagatctgg

SEQ ID NO: 44918 - DNA, 33 bp, Homo sapiens
aggccactgcgatcaacgccccaataacatatt

SEQ ID NO: 44919 - DNA, 33 bp, Homo sapiens
gtccagagaagtaagtcaatgttctgaagacat

SEQ ID NO: 44920 - DNA, 51 bp, Homo sapiens
aggctggggcactaggaaataaccactgggtctctgagttcctctcaaagc

SEQ ID NO: 44921 - DNA, 33 bp, Homo sapiens
aacattgattctgaaaagtaagcctgctccctt

SEQ ID NO: 44922 - DNA, 33 bp, Homo sapiens
tttggctttctggaaacttcattgacgtgcaac

SEQ ID NO: 44923 - DNA, 33 bp, Homo sapiens
tatatgggtcagtggggaactacctgttaaaca

SEQ ID NO: 44924 - DNA, 33 bp, Homo sapiens
tcacaatttttaagtcaacacctggaatttgga

SEQ ID NO: 44925 - DNA, 33 bp, Homo sapiens
attacaacacatagacaaactaagtatgttgta

SEQ ID NO: 44926 - DNA, 33 bp, Homo sapiens
gtcagtaactatgttaaattctgagatactaaa

SEQ ID NO: 44927 - DNA, 33 bp, Homo sapiens
tatgaatcacatggtaaatttccgttacatcag

SEQ ID NO: 44928 - DNA, 33 bp, Homo sapiens
aatattaatttctaaccatgtaagcgcatataa

SEQ ID NO: 44929 - DNA, 33 bp, Homo sapiens
tatttaattggtgttacgctcttgcaaaaattt

SEQ ID NO: 44930 - DNA, 33 bp, Homo sapiens
cactttatctcaaccacattttgctaggctttt

SEQ ID NO: 44931 - DNA, 33 bp, Homo sapiens
aattgtcaattatttgcacggtgatgaatgaag

SEQ ID NO: 44932 - DNA, 33 bp, Homo sapiens
acacctgcttttacaccaaaattagccttgcaa

SEQ ID NO: 44933 - DNA, 33 bp, Homo sapiens
ccagcagatcataaagaattgagaacagggaac

SEQ ID NO: 44934 - DNA, 51 bp, Homo sapiens
tcagtcctatttattttatacactaataccagatagcacttcctaaaatac

SEQ ID NO: 44935 - DNA, 51 bp, Homo sapiens
ctgattactttgctaatttatttgacgtatcctgcttcttcttcaagctca

SEQ ID NO: 44936 - DNA, 33 bp, Homo sapiens
caaaaattacaacgaaatgatcttgccctgaag

SEQ ID NO: 44937 - DNA, 33 bp, Homo sapiens
ggtacctttggatgtacgtaagagtgagcattt

SEQ ID NO: 44938 - DNA, 33 bp, Homo sapiens
tctatgactctcccatgactataattgctatta

SEQ ID NO: 44939 - DNA, 33 bp, Homo sapiens
aatgaagaaaagtacaaggaaggttgacattat

SEQ ID NO: 44940 - DNA, 33 bp, Homo sapiens
tcctctaaggtgcaccagaaaggaagtgttcac

SEQ ID NO: 44941 - DNA, 33 bp, Homo sapiens
cataaactgacggcaactggagtttaaatagtc

SEQ ID NO: 44942 - DNA, 51 bp, Homo sapiens
caaaggcgacatatttcaattgtaaagtttcagaaataaatgattaacaac

SEQ ID NO: 44943 - DNA, 33 bp, Homo sapiens
ccagcaataatacataccaatgtctgaagagca

SEQ ID NO: 44944 - DNA, 33 bp, Homo sapiens
tgccggtaatatcaagacattggagcaggagct

SEQ ID NO: 44945 - DNA, 33 bp, Homo sapiens
tggtcctgttaaaccacgtcagtttgaagtgtc

SEQ ID NO: 44946 - DNA, 33 bp, Homo sapiens
gatgaattttgtttgccattgttcattaggaat

SEQ ID NO: 44947 - DNA, 33 bp, Homo sapiens
ataccttagtttctcaacaaatcatatatattt

SEQ ID NO: 44948 - DNA, 33 bp, Homo sapiens
aacttaacagagttatcacaactttgcattttg

SEQ ID NO: 44949 - DNA, 33 bp, Homo sapiens
ttactaataagttcaaagtggttgctatttctt

SEQ ID NO: 44950 - DNA, 33 bp, Homo sapiens
caagtttatatatcaaagtaaccatcacatcca

SEQ ID NO: 44951 - DNA, 33 bp, Homo sapiens
tggaatctttgaaaagaatcgagagcccaaaag

SEQ ID NO: 44952 - DNA, 51 bp, Homo sapiens
ctctgctttgcagttttcacttcctattggagtcttttggtgaacagaagt

SEQ ID NO: 44953 - DNA, 33 bp, Homo sapiens
gttgcctgcagaattaccttgaatatgtagatt

SEQ ID NO: 44954 - DNA, 33 bp, Homo sapiens
cagagttttagaaatactatacagcagcattaa

SEQ ID NO: 44955 - DNA, 33 bp, Homo sapiens
ttaatcctgatttccccgacatttagttcaata

SEQ ID NO: 44956 - DNA, 33 bp, Homo sapiens
aagacgaaatttctgacgagaagacaactaaaa

SEQ ID NO: 44957 - DNA, 33 bp, Homo sapiens
catttctatatactgagaacgtccatgctgaga

SEQ ID NO: 44958 - DNA, 33 bp, Homo sapiens
ttcctctaaccgtacactccagagcctgatcct

SEQ ID NO: 44959 - DNA, 51 bp, Homo sapiens
aagaaggagcagcagacatgccaaacatgtaggcaaatatttttaaatata

SEQ ID NO: 44960 - DNA, 51 bp, Homo sapiens
tgctctagagattacattgtgccttgtcaacatattagtctgcttaaagtt

SEQ ID NO: 44961 - DNA, 33 bp, Homo sapiens
gaacaagcctagagtacgaaaatgacaataaat

SEQ ID NO: 44962 - DNA, 33 bp, Homo sapiens
aaacaatgtattcttcgaaagcgtgtatccatt

SEQ ID NO: 44963 - DNA, 33 bp, Homo sapiens
tttgaaccttttggtcaagtttcatattccagc

SEQ ID NO: 44964 - DNA, 33 bp, Homo sapiens
gagtagaggagagaagaaggcgtacctataaaa

SEQ ID NO: 44965 - DNA, 33 bp, Homo sapiens
ttttaatatgaggacacggaagaaagaaaacag

SEQ ID NO: 44966 - DNA, 33 bp, Homo sapiens
tggtctccgtattttacggcaaatttcttgtat

SEQ ID NO: 44967 - DNA, 33 bp, Homo sapiens
tgctggagaaagcgtccactcacagattgttct

SEQ ID NO: 44968 - DNA, 33 bp, Homo sapiens
ctaaccattcacagaaccatgttgtaggtccta

SEQ ID NO: 44969 - DNA, 33 bp, Homo sapiens
catattttgtgacatacagtgtgagtgctgaga

SEQ ID NO: 44970 - DNA, 33 bp, Homo sapiens
atgttctgtttaatgagagtgatgcagtagggt

SEQ ID NO: 44971 - DNA, 33 bp, Homo sapiens
taggatggtgaaactacgcctgggactttttat

SEQ ID NO: 44972 - DNA, 33 bp, Homo sapiens
actaaaactattagcacagggtttggcatgaac

SEQ ID NO: 44973 - DNA, 33 bp, Homo sapiens
caaaggtaatgagctacaataacatttgaaaac

SEQ ID NO: 44974 - DNA, 33 bp, Homo sapiens
acactaacaactttagaatctgctgatgaagca

SEQ ID NO: 44975 - DNA, 33 bp, Homo sapiens
tcctcttttataagcaaatcattttggtagtta

SEQ ID NO: 44976 - DNA, 33 bp, Homo sapiens
tattgacttgtagcaacggagcaatgtacttca

SEQ ID NO: 44977 - DNA, 51 bp, Homo sapiens
tgatttcaaataaaagtacagataaaatcatcttttagagatatgttgtca

SEQ ID NO: 44978 - DNA, 33 bp, Homo sapiens
gtgaaatacacaaaagaccttcaacatttggca

SEQ ID NO: 44979 - DNA, 33 bp, Homo sapiens
ccactgttcttgagtacattcaatgccatcaac

SEQ ID NO: 44980 - DNA, 33 bp, Homo sapiens
gtctcatactgtcgcccagtttgcagtgcaatg

SEQ ID NO: 44981 - DNA, 33 bp, Homo sapiens
atatagagaccataaaattattggaggagagat

SEQ ID NO: 44982 - DNA, 33 bp, Homo sapiens
ctctacagtttctgataaaaagttcattgtcat

SEQ ID NO: 44983 - DNA, 33 bp, Homo sapiens
atcaactttgactgtaacttagaaattatacag

SEQ ID NO: 44984 - DNA, 33 bp, Homo sapiens
gacatgtaatggtgccaatttttgatccacttg

SEQ ID NO: 44985 - DNA, 33 bp, Homo sapiens
tttgatgtgacaattcaaacctttgtgccattg

SEQ ID NO: 44986 - DNA, 33 bp, Homo sapiens
tctggctattctgtaccattcaaataacaactt

SEQ ID NO: 44987 - DNA, 33 bp, Homo sapiens
aacagaaaacatttccaaagacttataatatca

SEQ ID NO: 44988 - DNA, 33 bp, Homo sapiens
tagattattggcttgagtaccttacttctaatg

SEQ ID NO: 44989 - DNA, 33 bp, Homo sapiens
ctcttttagaaataccaacacagagtgagagat

SEQ ID NO: 44990 - DNA, 33 bp, Homo sapiens
tatgcatcagatacaaactaaatatttcagttt

SEQ ID NO: 44991 - DNA, 33 bp, Homo sapiens
agagaggaaagcggaaaaataagtcttgtggac

SEQ ID NO: 44992 - DNA, 33 bp, Homo sapiens
gtaacctgttcctatgcagcaaagagatggtgc

SEQ ID NO: 44993 - DNA, 33 bp, Homo sapiens
tagtacacttcctgcaggttgatatctccagaa

SEQ ID NO: 44994 - DNA, 33 bp, Homo sapiens
agaggcacatcaattcaaatttatgtcatattt

SEQ ID NO: 44995 - DNA, 33 bp, Homo sapiens
gtgattatctccacaacgaatctcagtatatat

SEQ ID NO: 44996 - DNA, 33 bp, Homo sapiens
tgaatgagaagtaacaaattatccaacattatt

SEQ ID NO: 44997 - DNA, 33 bp, Homo sapiens
gggcacagatgtcttaaaaaatctaacaagaat

SEQ ID NO: 44998 - DNA, 33 bp, Homo sapiens
cctcatgcaatgcagaacctttacaagaaataa

SEQ ID NO: 44999 - DNA, 51 bp, Homo sapiens
gttaaattacctaaactttcttataccctcttcaatattttgatgtgctat

SEQ ID NO: 45000 - DNA, 51 bp, Homo sapiens
ggaactggtaaaatttataaacaacaacatgtcagcataaacttgataaag

SEQ ID NO: 45001 - DNA, 33 bp, Homo sapiens
gaaaagcaaatgcctgaaaagttcctgccatta

SEQ ID NO: 45002 - DNA, 33 bp, Homo sapiens
tctactgtcagtaggacgtcttgctttatgaca

SEQ ID NO: 45003 - DNA, 51 bp, Homo sapiens
gaggacaaagagaccacagatgaaacattactgtagatgagtcttagctgt

SEQ ID NO: 45004 - DNA, 33 bp, Homo sapiens
aatcttttgaagtctcaatgttctcaactgtaa

SEQ ID NO: 45005 - DNA, 33 bp, Homo sapiens
tcatctttggatgctcaaactgtcaacagctca

SEQ ID NO: 45006 - DNA, 33 bp, Homo sapiens
ttgtcagtaattccagaaaataaaatgccctat

SEQ ID NO: 45007 - DNA, 33 bp, Homo sapiens
tgtgattatacattgccccataccaatatattt

SEQ ID NO: 45008 - DNA, 33 bp, Homo sapiens
gtcaaagattgctgaacccaaagagtattatgt

SEQ ID NO: 45009 - DNA, 33 bp, Homo sapiens
atttcacagtgcctgacgatgttcaaaatgtgt

SEQ ID NO: 45010 - DNA, 33 bp, Homo sapiens
gaacctcttagttttacgtggccttgaacgacc

SEQ ID NO: 45011 - DNA, 33 bp, Homo sapiens
attatctcctgaaggacgatttagcaaattgat

SEQ ID NO: 45012 - DNA, 33 bp, Homo sapiens
agagcaactgaacaccagcatcctttctccaaa

SEQ ID NO: 45013 - DNA, 33 bp, Homo sapiens
cagattccctggagaacggtcttctgatctctt

SEQ ID NO: 45014 - DNA, 33 bp, Homo sapiens
gagattattcgaaatacgttacttgaaatttta

SEQ ID NO: 45015 - DNA, 33 bp, Homo sapiens
tatttaaggcctgaacacactttatctttataa

SEQ ID NO: 45016 - DNA, 33 bp, Homo sapiens
tttttgaacttagtcaaagaaggcctttctaaa

SEQ ID NO: 45017 - DNA, 33 bp, Homo sapiens
ggttttcatgttgttacctacaccttaaaggca

SEQ ID NO: 45018 - DNA, 33 bp, Homo sapiens
ggagctaactgcctaaactctgtcctgttccct

SEQ ID NO: 45019 - DNA, 33 bp, Homo sapiens
aaaatggaaaaatacccgctgcattagtggaat

SEQ ID NO: 45020 - DNA, 33 bp, Homo sapiens
tctccactcactgctcgataaggacctgaccca

SEQ ID NO: 45021 - DNA, 33 bp, Homo sapiens
gaaagcactcccagaacagcatcccccagaggg

SEQ ID NO: 45022 - DNA, 33 bp, Homo sapiens
agagttcctgcatgaccgagttcctcctttctg

SEQ ID NO: 45023 - DNA, 33 bp, Homo sapiens
cctccattgtcacaaggccctttctatatgtat

SEQ ID NO: 45024 - DNA, 33 bp, Homo sapiens
tccatttgtttatttgcagtagttgtcatctga

SEQ ID NO: 45025 - DNA, 33 bp, Homo sapiens
ttgatgctcaacacaaattcattggagacaatg

SEQ ID NO: 45026 - DNA, 33 bp, Homo sapiens
agggatgtggagtaaccagagctcacactttac

SEQ ID NO: 45027 - DNA, 33 bp, Homo sapiens
aaatcatctggataaaactaacattcaggaatt

SEQ ID NO: 45028 - DNA, 33 bp, Homo sapiens
aaagaagcagtgagaacagcataaagaattagg

SEQ ID NO: 45029 - DNA, 33 bp, Homo sapiens
atttacccagtaccaaagtaatttccacatttt

SEQ ID NO: 45030 - DNA, 33 bp, Homo sapiens
aacccgagactgcaagacttcaaatttgtcttc

SEQ ID NO: 45031 - DNA, 51 bp, Homo sapiens
actttatatatatttttgtcagctacgaaaacattaaacgctctctactaa

SEQ ID NO: 45032 - DNA, 33 bp, Homo sapiens
agtagttgcactgctacaatcatatcttctttt

SEQ ID NO: 45033 - DNA, 33 bp, Homo sapiens
tgagaaatcaaagacaatggtgatacttcagag

SEQ ID NO: 45034 - DNA, 33 bp, Homo sapiens
atgatattgtggaaaacgtcaaagaggcctgaa

SEQ ID NO: 45035 - DNA, 33 bp, Homo sapiens
ggtacccaagttgcaaaatgagatccccttcct

SEQ ID NO: 45036 - DNA, 33 bp, Homo sapiens
aactcttttaattgccggaaagagcatctcgaa

SEQ ID NO: 45037 - DNA, 33 bp, Homo sapiens
aaagtggaacttgagaaaagaaagtaatattag

SEQ ID NO: 45038 - DNA, 33 bp, Homo sapiens
tcatgggaattgtcctaaaatccgagttcccag

SEQ ID NO: 45039 - DNA, 33 bp, Homo sapiens
gtgtcatacctgatgacgtaccacagagcttct

SEQ ID NO: 45040 - DNA, 33 bp, Homo sapiens
gaccagaatctgtctacgaggcagctctgctgt

SEQ ID NO: 45041 - DNA, 33 bp, Homo sapiens
attacagactcatcaacgacaccgtatttccca

SEQ ID NO: 45042 - DNA, 33 bp, Homo sapiens
acctagtcatcactgacagttcccttgggatat

SEQ ID NO: 45043 - DNA, 33 bp, Homo sapiens
attacacatatggctcactctaaatgcctgttc

SEQ ID NO: 45044 - DNA, 33 bp, Homo sapiens
tgaagagaacaaagtacgaaaacagtgaaaatt

SEQ ID NO: 45045 - DNA, 33 bp, Homo sapiens
gacagagatgccttaaactactgacttttcccc

SEQ ID NO: 45046 - DNA, 33 bp, Homo sapiens
aatttggaattgttcaaagacacaaaagctcaa

SEQ ID NO: 45047 - DNA, 33 bp, Homo sapiens
acctcatgtgcctctgaactgaacattgtatct

SEQ ID NO: 45048 - DNA, 33 bp, Homo sapiens
ccagaagacacagatgccactaactcatatggg

SEQ ID NO: 45049 - DNA, 51 bp, Homo sapiens
gtacctctaattctgctcttctcaaacctttaggccataggatggatctaa

SEQ ID NO: 45050 - DNA, 33 bp, Homo sapiens
ttcttcatgagctaaaaattgtaatcactgttg

SEQ ID NO: 45051 - DNA, 33 bp, Homo sapiens
cttcagaaacaggaaacgatgtgaaataaatta

SEQ ID NO: 45052 - DNA, 33 bp, Homo sapiens
tttcagcttatatgtaactagcattattcaagg

SEQ ID NO: 45053 - DNA, 33 bp, Homo sapiens
gctagttccaacaacccaggtgaccacattcca

SEQ ID NO: 45054 - DNA, 33 bp, Homo sapiens
tcatttgcctcctctgaattgattgcaacaaag

SEQ ID NO: 45055 - DNA, 33 bp, Homo sapiens
aagaggatcaactataaataagagagaagctat

SEQ ID NO: 45056 - DNA, 33 bp, Homo sapiens
ggttaattttggtcaaagaatgtgtatggggaa

SEQ ID NO: 45057 - DNA, 33 bp, Homo sapiens
atctttcttatgttgacgtcacttgttacttgc

SEQ ID NO: 45058 - DNA, 51 bp, Homo sapiens
gtgcttgccctctcttcagaagtaacgcttagaatacactgtaaacttttc

SEQ ID NO: 45059 - DNA, 33 bp, Homo sapiens
agaaatagtgtaaccagtcatggctctccgggt

SEQ ID NO: 45060 - DNA, 33 bp, Homo sapiens
aagaccttcaccaacaaattttgtaatcctatg

SEQ ID NO: 45061 - DNA, 33 bp, Homo sapiens
gttaaatgttttagccaaagatagaggcatatc

SEQ ID NO: 45062 - DNA, 33 bp, Homo sapiens
ctattgctaagctgaacttattttaccattatg

SEQ ID NO: 45063 - DNA, 33 bp, Homo sapiens
agggccgaaagagtagacgagggctggtggtct

SEQ ID NO: 45064 - DNA, 33 bp, Homo sapiens
taaatgggaagtaagaggactgaatcagcccct

SEQ ID NO: 45065 - DNA, 33 bp, Homo sapiens
ctcattcagagagtagaattgtttgtaaactct

SEQ ID NO: 45066 - DNA, 33 bp, Homo sapiens
tccactccatagctaacgcacactccagcgtaa

SEQ ID NO: 45067 - DNA, 33 bp, Homo sapiens
cccctctagactacgcaagcatgatcctttccc

SEQ ID NO: 45068 - DNA, 33 bp, Homo sapiens
ttttgccgttgcacctaaaactgcagaagttat

SEQ ID NO: 45069 - DNA, 33 bp, Homo sapiens
aaaaaagaaatcaaacaggaattagaacgtgtt

SEQ ID NO: 45070 - DNA, 33 bp, Homo sapiens
cagttcacaacatatccgacatcaggcaacaaa

SEQ ID NO: 45071 - DNA, 33 bp, Homo sapiens
gagagtaaaggtaagacgctcctgaagtgtctg

SEQ ID NO: 45072 - DNA, 33 bp, Homo sapiens
tgacctctgaaaatgacgaaataacaacttttt

SEQ ID NO: 45073 - DNA, 33 bp, Homo sapiens
aatgtttagtcaataaaaaaagtccagggttgt

SEQ ID NO: 45074 - DNA, 33 bp, Homo sapiens
ggctgccaaacatgcaaatagaagcaaaccttg

SEQ ID NO: 45075 - DNA, 33 bp, Homo sapiens
tgtgaatgagtggtaaactccaatactgttgca

SEQ ID NO: 45076 - DNA, 33 bp, Homo sapiens
aaaggaagcacaaataactctcaaactaagaaa

SEQ ID NO: 45077 - DNA, 33 bp, Homo sapiens
attccctcaacaattacagcaccttctgggtcc

SEQ ID NO: 45078 - DNA, 33 bp, Homo sapiens
gatgtaatcagccaaacagccaatgaggcagca

SEQ ID NO: 45079 - DNA, 33 bp, Homo sapiens
aatttcaactctgaaaattacataatcacaaag

SEQ ID NO: 45080 - DNA, 33 bp, Homo sapiens
ctcgtatcctgactacgagaagaacgaagcagg

SEQ ID NO: 45081 - DNA, 33 bp, Homo sapiens
ggaattaaaatacacaaacagatgtgcttggta

SEQ ID NO: 45082 - DNA, 33 bp, Homo sapiens
ttatgggtaagcagtaaaaatagacgtagaatg

SEQ ID NO: 45083 - DNA, 51 bp, Homo sapiens
attaagaactacaagggaaggaaaacgctgacccatagactaaagcagagg

SEQ ID NO: 45084 - DNA, 33 bp, Homo sapiens
cgtttcattgcagaaagaaaacgaatacaagca

SEQ ID NO: 45085 - DNA, 33 bp, Homo sapiens
agatgtgcgattataacgaataacacagagcaa

SEQ ID NO: 45086 - DNA, 33 bp, Homo sapiens
ctttcatggtcagaaccgtgatacttctactgg

SEQ ID NO: 45087 - DNA, 33 bp, Homo sapiens
attgggtttgtagacccggagtcatcagactgc

SEQ ID NO: 45088 - DNA, 33 bp, Homo sapiens
ttgtcatgatgatgccaagttgaaggaccattc

SEQ ID NO: 45089 - DNA, 33 bp, Homo sapiens
tggctccagggaacccaaagtaacatcacagcc

SEQ ID NO: 45090 - DNA, 33 bp, Homo sapiens
agctactcagctctggaaaagttcagtataatg

SEQ ID NO: 45091 - DNA, 33 bp, Homo sapiens
ccctaactcctccatcaactacctgaatacgtg

SEQ ID NO: 45092 - DNA, 33 bp, Homo sapiens
tgttaatgagtgttcaatcagcattagtgaatt

SEQ ID NO: 45093 - DNA, 33 bp, Homo sapiens
actgcatgaggtaataaatgtttgtcgttttat

SEQ ID NO: 45094 - DNA, 33 bp, Homo sapiens
tcacatttgctaagtcccttttgctgtgtaatg

SEQ ID NO: 45095 - DNA, 51 bp, Homo sapiens
aataattaaggtaaacacacatgtactaatgctcatattagctgctctcca

SEQ ID NO: 45096 - DNA, 51 bp, Homo sapiens
aagtccctcttcttagataaattcacagttagtgcagagaaattttctaat

SEQ ID NO: 45097 - DNA, 33 bp, Homo sapiens
tcaaaaggacacagtgaagtcattaaaaaccag

SEQ ID NO: 45098 - DNA, 51 bp, Homo sapiens
taactaaacagaatgtatatgtgccgcaatcaattaaatagggaactttat

SEQ ID NO: 45099 - DNA, 51 bp, Homo sapiens
ctgtggtttttaaatgtttgtaatacctgcaatgcactttgacgttcagtg

SEQ ID NO: 45100 - DNA, 33 bp, Homo sapiens
gagataaactttcagacgctgaagccccagaga

SEQ ID NO: 45101 - DNA, 33 bp, Homo sapiens
aacctgcatgggttcccgaaggtggcacagtct

SEQ ID NO: 45102 - DNA, 51 bp, Homo sapiens
atgggttttattaagaaaggcagaaactaattatttaaaacctgtaataaa

SEQ ID NO: 45103 - DNA, 33 bp, Homo sapiens
ccagtttctcagtcacaaatctagcccagagct

SEQ ID NO: 45104 - DNA, 33 bp, Homo sapiens
agaggtagtatcacgacgggcaaagaccgattc

SEQ ID NO: 45105 - DNA, 33 bp, Homo sapiens
gtacctgtccatgaaacgtctctgtagtagctg

SEQ ID NO: 45106 - DNA, 33 bp, Homo sapiens
tgtcacatggtatctcaatgtttactttttttc

SEQ ID NO: 45107 - DNA, 33 bp, Homo sapiens
tctgaaagcaaagaaccgtcaatctgaaatttt

SEQ ID NO: 45108 - DNA, 33 bp, Homo sapiens
agtggagagaataccagagtcctccgccagtcc

SEQ ID NO: 45109 - DNA, 33 bp, Homo sapiens
cttgttttccttgctcaagatatgccctgggtt

SEQ ID NO: 45110 - DNA, 33 bp, Homo sapiens
atttctgttctttctacattacccggtctcaga

SEQ ID NO: 45111 - DNA, 33 bp, Homo sapiens
ctcctgccgcttcaaaagataaagtctggcagg

SEQ ID NO: 45112 - DNA, 33 bp, Homo sapiens
tataggcattcctctcaaagtctcattactctg

SEQ ID NO: 45113 - DNA, 33 bp, Homo sapiens
accagtgaaaagaggcacactttctagtcatca

SEQ ID NO: 45114 - DNA, 33 bp, Homo sapiens
aactggggatttgaaaagtagaagacgcagcgc

SEQ ID NO: 45115 - DNA, 33 bp, Homo sapiens
ttcatcacctacaggagctggcaacctatggat

SEQ ID NO: 45116 - DNA, 33 bp, Homo sapiens
gaccgacacacctgcaaaaacgtaattcctttg

SEQ ID NO: 45117 - DNA, 33 bp, Homo sapiens
gttttagaatgcgacaatgggtttaatcctgtc

SEQ ID NO: 45118 - DNA, 33 bp, Homo sapiens
ctgccctgagcatctacattacagtacttgctg

SEQ ID NO: 45119 - DNA, 33 bp, Homo sapiens
gaaaaatggcatgaaacgagaaggagaaaatgt

SEQ ID NO: 45120 - DNA, 33 bp, Homo sapiens
cgccctgatctttggcaacttgtgtctttgcac

SEQ ID NO: 45121 - DNA, 33 bp, Homo sapiens
ttccctttgtggctaccatacatcaaaaacagg

SEQ ID NO: 45122 - DNA, 33 bp, Homo sapiens
ggtgccagcacagaagacttagtacctgcatgg

SEQ ID NO: 45123 - DNA, 33 bp, Homo sapiens
agacagactttttctaaatgtccaaagagctga

SEQ ID NO: 45124 - DNA, 33 bp, Homo sapiens
cctctgccactgaaaaagtgtggtttgatggag

SEQ ID NO: 45125 - DNA, 33 bp, Homo sapiens
ctgctcaacaaccttcaagtccagaatgcccca

SEQ ID NO: 45126 - DNA, 33 bp, Homo sapiens
aggagggcaaaaatcacctggtgaccattggac

SEQ ID NO: 45127 - DNA, 33 bp, Homo sapiens
atgcctgagagcttgcaccggggtggaggtagc

SEQ ID NO: 45128 - DNA, 33 bp, Homo sapiens
tatcttagatattccaatcaaatccaatctccc

SEQ ID NO: 45129 - DNA, 33 bp, Homo sapiens
agctttgcagatgtagacggttgaggtcacact

SEQ ID NO: 45130 - DNA, 33 bp, Homo sapiens
ccagcaccagggccacactgttcctcgggcctc

SEQ ID NO: 45131 - DNA, 33 bp, Homo sapiens
tgccagcaagccctccgcggatgtttgttgaat

SEQ ID NO: 45132 - DNA, 33 bp, Homo sapiens
acaggggtctcaggaacgttcatgggatacaat

SEQ ID NO: 45133 - DNA, 33 bp, Homo sapiens
tacagataggaagaaacctggcttgtgaggacg

SEQ ID NO: 45134 - DNA, 33 bp, Homo sapiens
gccttctggctgtaaccgggtttttcttctctg

SEQ ID NO: 45135 - DNA, 33 bp, Homo sapiens
agaccttgttacatcaacttacatcatcttaca

SEQ ID NO: 45136 - DNA, 33 bp, Homo sapiens
agacaatctttccagaagtgctttacaacagtg

SEQ ID NO: 45137 - DNA, 33 bp, Homo sapiens
gtgacaaccacagatagcccaacactggcaagt

SEQ ID NO: 45138 - DNA, 33 bp, Homo sapiens
aattgagaatgagctcaccatcgctggaggtat

SEQ ID NO: 45139 - DNA, 33 bp, Homo sapiens
acctcatctcgcactcacaggctgttattaggg

SEQ ID NO: 45140 - DNA, 33 bp, Homo sapiens
cgcggaatctgggctgcacgtgtgttctgtttg

SEQ ID NO: 45141 - DNA, 33 bp, Homo sapiens
tctccggccccctccaatctatctcaagccttg

SEQ ID NO: 45142 - DNA, 33 bp, Homo sapiens
ggatgttaaataaagacgaggagcccacttgac

SEQ ID NO: 45143 - DNA, 33 bp, Homo sapiens
gcacacctacgccatacggtatgcttgagagcc

SEQ ID NO: 45144 - DNA, 33 bp, Homo sapiens
gcaattaggagctgtgcactttaaacacaatga

SEQ ID NO: 45145 - DNA, 33 bp, Homo sapiens
agcgcatcggcacaccagatgagggtctctctc

SEQ ID NO: 45146 - DNA, 33 bp, Homo sapiens
aggtaatataagagctcaccagatagagtagac

SEQ ID NO: 45147 - DNA, 33 bp, Homo sapiens
gtttaaggtcatcctccctcaaaaccagtattc

SEQ ID NO: 45148 - DNA, 33 bp, Homo sapiens
tgaaaagcccgctgtccctgcacgtcccacact

SEQ ID NO: 45149 - DNA, 33 bp, Homo sapiens
gaacacttagaacaccacattttatagatgaga

SEQ ID NO: 45150 - DNA, 33 bp, Homo sapiens
agctgtaccagggttacggatagttgtaggaag

SEQ ID NO: 45151 - DNA, 33 bp, Homo sapiens
gaatgacacaaagtaactgtgagctatgatgat

SEQ ID NO: 45152 - DNA, 33 bp, Homo sapiens
aaggcgtttaggaagcaatgagtttgagtgttt

SEQ ID NO: 45153 - DNA, 33 bp, Homo sapiens
agaatagatgttttacaagaccacaggctgaga

SEQ ID NO: 45154 - DNA, 33 bp, Homo sapiens
ttcatacatcttgttaaagtttgctcatgttat

SEQ ID NO: 45155 - DNA, 33 bp, Homo sapiens
ggcagtttctggattgaaatatcagtcatgcat

SEQ ID NO: 45156 - DNA, 33 bp, Homo sapiens
gcttgcgacacttcacaggctatcgcatcgagc

SEQ ID NO: 45157 - DNA, 33 bp, Homo sapiens
gtccctggagtaagcaaacttccttatacctat

SEQ ID NO: 45158 - DNA, 33 bp, Homo sapiens
aacagaggcgtgcagcaaagtaaacacgggaag

SEQ ID NO: 45159 - DNA, 33 bp, Homo sapiens
ctattctgatctattccatttgggctagcttag

SEQ ID NO: 45160 - DNA, 33 bp, Homo sapiens
tcttctctagtccatgaatatgtatacgtacat

SEQ ID NO: 45161 - DNA, 33 bp, Homo sapiens
tctttaactgaagagccgatctttattctggga

SEQ ID NO: 45162 - DNA, 33 bp, Homo sapiens
cccagtgatgactgccagaaacattttgttctg

SEQ ID NO: 45163 - DNA, 33 bp, Homo sapiens
tggcttctaggtggcaaggctaaataaatacat

SEQ ID NO: 45164 - DNA, 33 bp, Homo sapiens
ctattgctgtctgcaaactacttcaaaatgcaa

SEQ ID NO: 45165 - DNA, 33 bp, Homo sapiens
ccacagtctaccttgacatttgagttttctgag

SEQ ID NO: 45166 - DNA, 33 bp, Homo sapiens
tcacacttccatgactgacacagagaagagtga

SEQ ID NO: 45167 - DNA, 33 bp, Homo sapiens
tctgctactttctggacaaataaggaaacctct

SEQ ID NO: 45168 - DNA, 33 bp, Homo sapiens
gaaatgttcaatgtgcaagcttctataaaactc

SEQ ID NO: 45169 - DNA, 33 bp, Homo sapiens
acacaagtaaatgcacactcaaatataggagct

SEQ ID NO: 45170 - DNA, 33 bp, Homo sapiens
aagggcacagataaggcactaggcatagaatct

SEQ ID NO: 45171 - DNA, 33 bp, Homo sapiens
ggggccagcacgtctgcagccttttatgggcac

SEQ ID NO: 45172 - DNA, 33 bp, Homo sapiens
caacgggccagaccacaggaaggacggtgtttg

SEQ ID NO: 45173 - DNA, 33 bp, Homo sapiens
ggcctggctgaccagaaatttggaaacccgacg

SEQ ID NO: 45174 - DNA, 33 bp, Homo sapiens
ctggtcctgcgtgagactatctacaaaccttcc

SEQ ID NO: 45175 - DNA, 33 bp, Homo sapiens
agggtgcaactgccaaaaactggtcctgcgtga

SEQ ID NO: 45176 - DNA, 33 bp, Homo sapiens
cccatttcatctggtacctaacaggtcttgtgc

SEQ ID NO: 45177 - DNA, 33 bp, Homo sapiens
atgtgagccacagcgacaggaactattaccaat

SEQ ID NO: 45178 - DNA, 33 bp, Homo sapiens
tttttgctcaggttacgcaatatgaagacaacc

SEQ ID NO: 45179 - DNA, 51 bp, Homo sapiens
atacggctacctacctagtacacatcatctacaatataacattttcttttt

SEQ ID NO: 45180 - DNA, 33 bp, Homo sapiens
acttttaccccagttccagatgacagactgaac

SEQ ID NO: 45181 - DNA, 33 bp, Homo sapiens
aagaattagtgcaggaacaattacaaaagggac

SEQ ID NO: 45182 - DNA, 33 bp, Homo sapiens
gccacatcgttttgtcaacttttttgttttgtt

SEQ ID NO: 45183 - DNA, 33 bp, Homo sapiens
ccatgctctgcttctcaacctgtgttttcacct

SEQ ID NO: 45184 - DNA, 33 bp, Homo sapiens
gactactcagatgatgaaaaactattgtatata

SEQ ID NO: 45185 - DNA, 51 bp, Homo sapiens
ttttttatcaaaagcaaccaactcaaatttgctaatccaacagttactaag

SEQ ID NO: 45186 - DNA, 33 bp, Homo sapiens
ggtggtgccctcaggactcctcgtgtgtcaatg

SEQ ID NO: 45187 - DNA, 51 bp, Homo sapiens
aaacaagaaagaagcacatccctcaaagtttttgtactgccattcctcctg

SEQ ID NO: 45188 - DNA, 33 bp, Homo sapiens
aaaggaaatggcatcaatatgtcaaggagatat

SEQ ID NO: 45189 - DNA, 33 bp, Homo sapiens
ctgtgcccagcctacaagtctcatttctgtaat

SEQ ID NO: 45190 - DNA, 33 bp, Homo sapiens
ttggtgagtatgtgaaaaaatcaggacccttat

SEQ ID NO: 45191 - DNA, 33 bp, Homo sapiens
ccccgcacggtactgaccaccctaaaatatatc

SEQ ID NO: 45192 - DNA, 33 bp, Homo sapiens
atttaatttaatgttcacttttgacttcaacag

SEQ ID NO: 45193 - DNA, 33 bp, Homo sapiens
atgttctgcaacacctaagcatagctcaacgct

SEQ ID NO: 45194 - DNA, 33 bp, Homo sapiens
cctttgagtctgtgctaacctaagcctggttga

SEQ ID NO: 45195 - DNA, 33 bp, Homo sapiens
ggcaagtaggaagtagaatggcccagaccactt

SEQ ID NO: 45196 - DNA, 33 bp, Homo sapiens
catatgtataccatgacgacttgtgtgggtgca

SEQ ID NO: 45197 - DNA, 33 bp, Homo sapiens
gaggtgagtagtaggccgacaatcaaaacttca

SEQ ID NO: 45198 - DNA, 33 bp, Homo sapiens
cctctttgccaaatccaagggcatgaaggtcta

SEQ ID NO: 45199 - DNA, 33 bp, Homo sapiens
cgactttgaaccaaggaccgaacttctctgagc

SEQ ID NO: 45200 - DNA, 33 bp, Homo sapiens
gggagacacagagagtaaagaatccagctggac

SEQ ID NO: 45201 - DNA, 33 bp, Homo sapiens
gctcaactgagacctgaaaggattgagcccagc

SEQ ID NO: 45202 - DNA, 33 bp, Homo sapiens
cacaatctatgcacgtaacaaaattacacttgt

SEQ ID NO: 45203 - DNA, 33 bp, Homo sapiens
tgtaagataaagcagacactatgaggaactaga

SEQ ID NO: 45204 - DNA, 33 bp, Homo sapiens
gaaccatcacaaccgaactggctatttacgatg

SEQ ID NO: 45205 - DNA, 33 bp, Homo sapiens
ctgtgaaataaggcaaatgagggactctccagg

SEQ ID NO: 45206 - DNA, 33 bp, Homo sapiens
cagtccaggcaagacaaattcatcctgtaccct

SEQ ID NO: 45207 - DNA, 33 bp, Homo sapiens
tctcaagatgcattgaagagatgagacaccatg

SEQ ID NO: 45208 - DNA, 51 bp, Homo sapiens
gcagtcagttgaactcaactgtttaacaagaaggaatttttcatctcagtc

SEQ ID NO: 45209 - DNA, 33 bp, Homo sapiens
gtaattggggccttgaacctgatccagctttga

SEQ ID NO: 45210 - DNA, 33 bp, Homo sapiens
ttgaaagtctacactccatgcttcaggtggtcc

SEQ ID NO: 45211 - DNA, 33 bp, Homo sapiens
catgtaaaaatgataccctttggctttggctta

SEQ ID NO: 45212 - DNA, 33 bp, Homo sapiens
agtaactgaggaagaactggtatctctgtaaaa

SEQ ID NO: 45213 - DNA, 33 bp, Homo sapiens
tggctattcttcacctaacttttaaaatagtat

SEQ ID NO: 45214 - DNA, 33 bp, Homo sapiens
aagatctgaaaagcttcaagagccacactctca

SEQ ID NO: 45215 - DNA, 33 bp, Homo sapiens
atcactttcaggtacacgtatcaaatgtagatt

SEQ ID NO: 45216 - DNA, 33 bp, Homo sapiens
actgacaactaataaccgagtgtgcccagaatc

SEQ ID NO: 45217 - DNA, 33 bp, Homo sapiens
cctggccaggcaaccaagtgatatgactctctg

SEQ ID NO: 45218 - DNA, 51 bp, Homo sapiens
acccaacagacagcatacatggtcaacactatccaggactctccataataa

SEQ ID NO: 45219 - DNA, 33 bp, Homo sapiens
gtccacagaacttttgcaggaatggatatgaat

SEQ ID NO: 45220 - DNA, 33 bp, Homo sapiens
aggcattatcctcaaaacctaaagctgctctca

SEQ ID NO: 45221 - DNA, 33 bp, Homo sapiens
atccccaggatcagaacatcttccactccttcc

SEQ ID NO: 45222 - DNA, 33 bp, Homo sapiens
cctgacatccagctcactcatgcacatcccttg

SEQ ID NO: 45223 - DNA, 33 bp, Homo sapiens
ctccttcaactctaggaactcagaagcctttta

SEQ ID NO: 45224 - DNA, 33 bp, Homo sapiens
ccaatccagctttccccccagcatcatctatct

SEQ ID NO: 45225 - DNA, 33 bp, Homo sapiens
ggtggaactggaacgagtaaaacactaccatat

SEQ ID NO: 45226 - DNA, 51 bp, Homo sapiens
gtagagtacgcccagaatctatcaacttaaggattaaacttaaatctactc

SEQ ID NO: 45227 - DNA, 33 bp, Homo sapiens
gtggaaaagacaaagcaatttttcttacaagaa

SEQ ID NO: 45228 - DNA, 33 bp, Homo sapiens
ttaatcagggccaggaatactcacgcaggaaat

SEQ ID NO: 45229 - DNA, 33 bp, Homo sapiens
taaaatctcaaatcgcaatgtccctagcaatct

SEQ ID NO: 45230 - DNA, 33 bp, Homo sapiens
cattttcacagcagcaaaaggtcatcaggagat

SEQ ID NO: 45231 - DNA, 33 bp, Homo sapiens
gtgaggtacaatcccaatgccatctatctgctc

SEQ ID NO: 45232 - DNA, 33 bp, Homo sapiens
atgtggtacacgaatacgacagaatattattca

SEQ ID NO: 45233 - DNA, 33 bp, Homo sapiens
tggatctcactctatcactgttatatgttacgt

SEQ ID NO: 45234 - DNA, 33 bp, Homo sapiens
tgtcaccatattgttaactggtttttatgtaga

SEQ ID NO: 45235 - DNA, 33 bp, Homo sapiens
agatcaagtgtaaagacaagtaaatggtagttg

SEQ ID NO: 45236 - DNA, 33 bp, Homo sapiens
ggcagaagattgcacaacctccctggaccctta

SEQ ID NO: 45237 - DNA, 33 bp, Homo sapiens
agcagaatctttttgcaccatgcatgacattcc

SEQ ID NO: 45238 - DNA, 33 bp, Homo sapiens
gggacctcccataaacagaatcacagagtcacc

SEQ ID NO: 45239 - DNA, 33 bp, Homo sapiens
ctagacaactgagaaaccattcccattttgcaa

SEQ ID NO: 45240 - DNA, 33 bp, Homo sapiens
gtgttttgtagttttcaatgtacaaacttgctc

SEQ ID NO: 45241 - DNA, 33 bp, Homo sapiens
gaggctttgttttataaatgggaaccacagaaa

SEQ ID NO: 45242 - DNA, 33 bp, Homo sapiens
gcccttaggcaaatcaccaatgacccatgttca

SEQ ID NO: 45243 - DNA, 33 bp, Homo sapiens
cagctatcaccctgagccaccgaacttccttcc

SEQ ID NO: 45244 - DNA, 33 bp, Homo sapiens
ttttgtgtgttcaggacgcagactggagtgggt

SEQ ID NO: 45245 - DNA, 51 bp, Homo sapiens
ggtattgttttgtcctagcattactcagaccatcctcatttctatccaggc

SEQ ID NO: 45246 - DNA, 33 bp, Homo sapiens
cctgtattatcaaccacgcaagatcacatcttg

SEQ ID NO: 45247 - DNA, 33 bp, Homo sapiens
ccagaagagatatacaatgatgctgataatttc

SEQ ID NO: 45248 - DNA, 33 bp, Homo sapiens
ttggcttggggtgaaacgtggacatgggagttc

SEQ ID NO: 45249 - DNA, 33 bp, Homo sapiens
atgaacacctatacacaaaattctccaaaattc

SEQ ID NO: 45250 - DNA, 33 bp, Homo sapiens
gtgtgttctgacagtaacccatatggaactggg

SEQ ID NO: 45251 - DNA, 33 bp, Homo sapiens
tccaggcatggcatccactgctgtagagaagtt

SEQ ID NO: 45252 - DNA, 33 bp, Homo sapiens
tttgttgtcattgccacggaaaccttttattat

SEQ ID NO: 45253 - DNA, 33 bp, Homo sapiens
aattaataactttacaatagcctctaagcgtcg

SEQ ID NO: 45254 - DNA, 33 bp, Homo sapiens
aaattctaatgcattcacataacctttttcaag

SEQ ID NO: 45255 - DNA, 33 bp, Homo sapiens
cctagaggacctgggaccaagctgctagaccac

SEQ ID NO: 45256 - DNA, 33 bp, Homo sapiens
ggttgtttctaggaacactaccatcaaagatat

SEQ ID NO: 45257 - DNA, 33 bp, Homo sapiens
aggaggcacaaaataactgttttctagtgtgtc

SEQ ID NO: 45258 - DNA, 33 bp, Homo sapiens
ggtgatttggaactgaaattggcttttatttta

SEQ ID NO: 45259 - DNA, 33 bp, Homo sapiens
tcggtaattaaacacgaaacagctgtcactctg

SEQ ID NO: 45260 - DNA, 33 bp, Homo sapiens
ccacagaacagtatgcacacttgctaaaaatct

SEQ ID NO: 45261 - DNA, 33 bp, Homo sapiens
acattgccaagtgtaaggacgtttactttctgt

SEQ ID NO: 45262 - DNA, 33 bp, Homo sapiens
gatttccctataaacaaataatgcaccatgaac

SEQ ID NO: 45263 - DNA, 33 bp, Homo sapiens
catcttctagcacggaataattaaattcaagtt

SEQ ID NO: 45264 - DNA, 33 bp, Homo sapiens
acttaatccatcaataataactgagcatcctta

SEQ ID NO: 45265 - DNA, 33 bp, Homo sapiens
acgctgaagccactgaaattcctgaccagtttc

SEQ ID NO: 45266 - DNA, 33 bp, Homo sapiens
atgtgggacagtacacacagagtgttgccaatc

SEQ ID NO: 45267 - DNA, 33 bp, Homo sapiens
acagagtatgatacacagtactctctaagcttc

SEQ ID NO: 45268 - DNA, 33 bp, Homo sapiens
tgtcataatatccccactgcctatctccatata

SEQ ID NO: 45269 - DNA, 33 bp, Homo sapiens
gtattcggccttctataaggtggctagctggtt

SEQ ID NO: 45270 - DNA, 33 bp, Homo sapiens
ctgtcatcctcacaaaaaaatgcaggtgacctt

SEQ ID NO: 45271 - DNA, 33 bp, Homo sapiens
ctctaccatttttaaccgcgtaactttgaggcg

SEQ ID NO: 45272 - DNA, 33 bp, Homo sapiens
cagctttgttctttaacgagagtatttagtcat

SEQ ID NO: 45273 - DNA, 33 bp, Homo sapiens
tggtgaaccaagaaagccgtaaatacatggata

SEQ ID NO: 45274 - DNA, 51 bp, Homo sapiens
aaaagagattatgcagaatgcaattaaaaaagacaaatgagcagatgtaca

SEQ ID NO: 45275 - DNA, 51 bp, Homo sapiens
tctgaagagaaaaattactggactgaaaggtataaaaagagattatgcaga

SEQ ID NO: 45276 - DNA, 33 bp, Homo sapiens
ctccttgttccttagccaccagaactgatggag

SEQ ID NO: 45277 - DNA, 33 bp, Homo sapiens
agcacagacattaagaaaaccaggtagcaacag

SEQ ID NO: 45278 - DNA, 51 bp, Homo sapiens
tagaaacagctgcctttaatgacagcaagatgtaagacaagtgtttattaa

SEQ ID NO: 45279 - DNA, 51 bp, Homo sapiens
tgcatctctctgatccagctgggaaagtgttgggaaaaagctgagggttag

SEQ ID NO: 45280 - DNA, 33 bp, Homo sapiens
gtgattttccaacctacatgataactttattcc

SEQ ID NO: 45281 - DNA, 33 bp, Homo sapiens
gatacatataacaaaaagatcaactagtagagc

SEQ ID NO: 45282 - DNA, 33 bp, Homo sapiens
agagcaatggaattaacgtggatgacatcataa

SEQ ID NO: 45283 - DNA, 33 bp, Homo sapiens
agtggttcagatttacaagggtaactcaggtga

SEQ ID NO: 45284 - DNA, 33 bp, Homo sapiens
cctggattaaatgtcaactgtagctagtgagga

SEQ ID NO: 45285 - DNA, 33 bp, Homo sapiens
gttgactggctagtgacccttcatgccccagga

SEQ ID NO: 45286 - DNA, 33 bp, Homo sapiens
agaaaagaaaagcaggaattggcgagccagcag

SEQ ID NO: 45287 - DNA, 33 bp, Homo sapiens
gaaagaaatgactctacacaatgacctgagtca

SEQ ID NO: 45288 - DNA, 33 bp, Homo sapiens
cctcctcgaggtgggcaaagatcacagccggca

SEQ ID NO: 45289 - DNA, 33 bp, Homo sapiens
tatctatttgattaggccatgaatttaggcgag

SEQ ID NO: 45290 - DNA, 33 bp, Homo sapiens
ccgtccaggaatggacaatttcgcttccctgca

SEQ ID NO: 45291 - DNA, 33 bp, Homo sapiens
aacggaacttaaaagaatcatgtgacccaggaa

SEQ ID NO: 45292 - DNA, 33 bp, Homo sapiens
atccaattctcaatcaactgggccctgagtgga

SEQ ID NO: 45293 - DNA, 33 bp, Homo sapiens
cctgtcgggatgactaccaaatcctggaaaatt

SEQ ID NO: 45294 - DNA, 33 bp, Homo sapiens
aatgcacagataaagacgatggagtgaggatga

SEQ ID NO: 45295 - DNA, 33 bp, Homo sapiens
ggctggtgggaacaaaaatatctatcagggcat

SEQ ID NO: 45296 - DNA, 33 bp, Homo sapiens
catgttgatgccatcgccaagtcctgatcaggt

SEQ ID NO: 45297 - DNA, 33 bp, Homo sapiens
ggcctttgttggcccacggtcagtgcctagcga

SEQ ID NO: 45298 - DNA, 33 bp, Homo sapiens
attaaaatctttctccaactacagaccaccatt

SEQ ID NO: 45299 - DNA, 33 bp, Homo sapiens
cttgggtttttcaatgcagattgctaacatgaa

SEQ ID NO: 45300 - DNA, 33 bp, Homo sapiens
tccacatggccctagaaacatttctttcctttt

SEQ ID NO: 45301 - DNA, 33 bp, Homo sapiens
aaaatgaaaacacaaagtctcaccattgccaac

SEQ ID NO: 45302 - DNA, 33 bp, Homo sapiens
acaagcacctcctaaacctcatctttgtctcta

SEQ ID NO: 45303 - DNA, 33 bp, Homo sapiens
ttttacctcttcagtaaacataataccatgaaa

SEQ ID NO: 45304 - DNA, 33 bp, Homo sapiens
aaaccatatcaatggacgaaacaactgagtcac

SEQ ID NO: 45305 - DNA, 33 bp, Homo sapiens
tctggaaaatatgaaaacttgctcaaccctacc

SEQ ID NO: 45306 - DNA, 33 bp, Homo sapiens
atgatgtcagagactcaagaatgcgcggctggt

SEQ ID NO: 45307 - DNA, 33 bp, Homo sapiens
ccccttccttaccctcacactaagaacagtggc

SEQ ID NO: 45308 - DNA, 33 bp, Homo sapiens
aaatatcttccgctacccgggagaccccgcggg

SEQ ID NO: 45309 - DNA, 33 bp, Homo sapiens
tgggacaactgccaacagagtgtcgtaggcgcg

SEQ ID NO: 45310 - DNA, 33 bp, Homo sapiens
acttactattacctggacattttttccagcctc

SEQ ID NO: 45311 - DNA, 33 bp, Homo sapiens
gagcagatctgtctggaaggcatattctcaatc

SEQ ID NO: 45312 - DNA, 33 bp, Homo sapiens
ctgctattaccgcatcactatgtcagttgaggc

SEQ ID NO: 45313 - DNA, 33 bp, Homo sapiens
cacaaaccttgcccatcagtcggaatcaatttc

SEQ ID NO: 45314 - DNA, 33 bp, Homo sapiens
cttgcgcgtctctctcactgcttattcttcata

SEQ ID NO: 45315 - DNA, 33 bp, Homo sapiens
caaaactcttgattgacaccttgtttcccgtct

SEQ ID NO: 45316 - DNA, 33 bp, Homo sapiens
gcaataagacaaaaaaagctgacagcatgccat

SEQ ID NO: 45317 - DNA, 33 bp, Homo sapiens
tatttcctaatctcaacctctttcctcagctcc

SEQ ID NO: 45318 - DNA, 33 bp, Homo sapiens
tctactgaccaagggccgccaaactattgccag

SEQ ID NO: 45319 - DNA, 33 bp, Homo sapiens
gtgggtgagtcacgcacccttcccacgacttgg

SEQ ID NO: 45320 - DNA, 51 bp, Homo sapiens
agatgaaggaacccattcaacttgaaattactgaaaaaagacatgggactt

SEQ ID NO: 45321 - DNA, 33 bp, Homo sapiens
tagttttaacagcatgcacctggtctctacaac

SEQ ID NO: 45322 - DNA, 33 bp, Homo sapiens
gcgaactcactcatgactacgagaacagcatgg

SEQ ID NO: 45323 - DNA, 51 bp, Homo sapiens
cgtgtcagggtccgcaatcaggtggcgaacatcccgtccttcattgtccgc

SEQ ID NO: 45324 - DNA, 33 bp, Homo sapiens
gatcgtgagtcataaaaggcctgcaaatttcat

SEQ ID NO: 45325 - DNA, 33 bp, Homo sapiens
gcaatggtcaaaaagaatccaactgtgcaggct

SEQ ID NO: 45326 - DNA, 33 bp, Homo sapiens
tcaacgcgattcgtaacgcttcctaattcgtag

SEQ ID NO: 45327 - DNA, 33 bp, Homo sapiens
atcccaaactcatccgaagcacaattttacccc

SEQ ID NO: 45328 - DNA, 51 bp, Homo sapiens
tggaaaagactttctttcctaatgaagagagctctgccaacagagtctctc

SEQ ID NO: 45329 - DNA, 33 bp, Homo sapiens
gagacatggaggagcacgtgggtagctagcatt

SEQ ID NO: 45330 - DNA, 33 bp, Homo sapiens
ctattcagacaatttacagcatcacggaaccta

SEQ ID NO: 45331 - DNA, 33 bp, Homo sapiens
ggaaaggatacaatacacctgacccagctgctc

SEQ ID NO: 45332 - DNA, 33 bp, Homo sapiens
atcaggattctagatcaaacctggattatgact

SEQ ID NO: 45333 - DNA, 33 bp, Homo sapiens
acagacatataagtaccagttgccaccagaatc

SEQ ID NO: 45334 - DNA, 33 bp, Homo sapiens
catctcaggtccataaaaaacacgggagagtcc

SEQ ID NO: 45335 - DNA, 33 bp, Homo sapiens
gtaggtttttctctcacgtttggagacgaggga

SEQ ID NO: 45336 - DNA, 33 bp, Homo sapiens
gttaggtgctgactcacgagagtgaaaaccaaa

SEQ ID NO: 45337 - DNA, 33 bp, Homo sapiens
atattgtgtccaactacggaagagttcccctac

SEQ ID NO: 45338 - DNA, 33 bp, Homo sapiens
tttcctgtctgaaaacacttgctctacaaaaac

SEQ ID NO: 45339 - DNA, 33 bp, Homo sapiens
attagagtttacataacagccgagctgagaaaa

SEQ ID NO: 45340 - DNA, 33 bp, Homo sapiens
agggaagaggatagaaatgtgcataatcatgtg

SEQ ID NO: 45341 - DNA, 33 bp, Homo sapiens
caaagggccaaattacaagacaaatgaggttcc

SEQ ID NO: 45342 - DNA, 33 bp, Homo sapiens
ccagtggcttagtaaacggagtcacattaaatg

SEQ ID NO: 45343 - DNA, 33 bp, Homo sapiens
ttagacgcccccaatagacagactattttcttt

SEQ ID NO: 45344 - DNA, 33 bp, Homo sapiens
aagcaagattgtgatacgtttgacttacatgaa

SEQ ID NO: 45345 - DNA, 33 bp, Homo sapiens
caggagtgggctgataaaactttgccgtggcag

SEQ ID NO: 45346 - DNA, 33 bp, Homo sapiens
gttgacaatctatatcaatttgacagctttcta

SEQ ID NO: 45347 - DNA, 33 bp, Homo sapiens
agatctgtgaaaagtcaatttctgctgtttaaa

SEQ ID NO: 45348 - DNA, 33 bp, Homo sapiens
tggaaagtgacgatcaaagaggtaaagacacct

SEQ ID NO: 45349 - DNA, 33 bp, Homo sapiens
catatttaaatcgcccaatagaatggaatcaag

SEQ ID NO: 45350 - DNA, 33 bp, Homo sapiens
tcatgtttagatatgaaaatgaacatatttaaa

SEQ ID NO: 45351 - DNA, 33 bp, Homo sapiens
tgtgccttaaatgagaagaaatcgatctgatgt

SEQ ID NO: 45352 - DNA, 33 bp, Homo sapiens
tgtatttcagttcttacagtgtgtgctgatttt

SEQ ID NO: 45353 - DNA, 33 bp, Homo sapiens
cacatggtgtgttttgaacatttttctgggagt

SEQ ID NO: 45354 - DNA, 33 bp, Homo sapiens
ctcagctcaatgcaaaacttggcctcctgggtt

SEQ ID NO: 45355 - DNA, 33 bp, Homo sapiens
tctgaatttcaatggccaagaatagtccaacag

SEQ ID NO: 45356 - DNA, 33 bp, Homo sapiens
acactgaaaacacatagcaggccaatgctgtgt

SEQ ID NO: 45357 - DNA, 33 bp, Homo sapiens
ctgtcttaaggcctgcaatctcaactcaggagg

SEQ ID NO: 45358 - DNA, 33 bp, Homo sapiens
gttatttaatcaaatactagtatggaatgaggc

SEQ ID NO: 45359 - DNA, 33 bp, Homo sapiens
aaaaagttgacaggtagtacagaacgatatgat

SEQ ID NO: 45360 - DNA, 33 bp, Homo sapiens
tgtcggattttaggagcctcactacagagggca

SEQ ID NO: 45361 - DNA, 33 bp, Homo sapiens
accattagtccaaagacgctaaacccaaggact

SEQ ID NO: 45362 - DNA, 33 bp, Homo sapiens
tgacacagcagggtcacgttctctcctgaggcc

SEQ ID NO: 45363 - DNA, 33 bp, Homo sapiens
gtttgtaggatgtaaaataagagagtgagagag

SEQ ID NO: 45364 - DNA, 33 bp, Homo sapiens
tctacaataaaaccatcaatctcaaatcattgg

SEQ ID NO: 45365 - DNA, 33 bp, Homo sapiens
ttgagtcatagctaaaatgtggtttcagataaa

SEQ ID NO: 45366 - DNA, 33 bp, Homo sapiens
tggcccattcttaaggccagcaattaagctcca

SEQ ID NO: 45367 - DNA, 33 bp, Homo sapiens
tcatgaaggtgatgaaagctacaaatatgtttt

SEQ ID NO: 45368 - DNA, 33 bp, Homo sapiens
ccttgagtaggtatcccctcacctatggaggcc

SEQ ID NO: 45369 - DNA, 51 bp, Homo sapiens
gtcttctcccagagaaagaaaaagaccaccgttattcctaggggaacctct

SEQ ID NO: 45370 - DNA, 51 bp, Homo sapiens
cactcagatgtgtcttatcagaatacggaatcaccagctactttaatggat

SEQ ID NO: 45371 - DNA, 33 bp, Homo sapiens
ttgttttccactgggaacagtctatgtaagtac

SEQ ID NO: 45372 - DNA, 33 bp, Homo sapiens
ctccatggtgacccttcaaatgtcagtagcagg

SEQ ID NO: 45373 - DNA, 33 bp, Homo sapiens
cttgtggtccttgaataatcactgtacgtggct

SEQ ID NO: 45374 - DNA, 33 bp, Homo sapiens
tgcagcagaaatagaacgtgtacaggaacctat

SEQ ID NO: 45375 - DNA, 33 bp, Homo sapiens
caatacaaaagctgctaacacaagtaaacagtg

SEQ ID NO: 45376 - DNA, 33 bp, Homo sapiens
ccagccatgcaggggacgataaaagctcagcag

SEQ ID NO: 45377 - DNA, 33 bp, Homo sapiens
tgtcgtcttaagccaccaaattcatggtaaatt

SEQ ID NO: 45378 - DNA, 33 bp, Homo sapiens
gctggaggcttgtacactggggtcatgaaagac

SEQ ID NO: 45379 - DNA, 33 bp, Homo sapiens
agttggcccaattttacgcatggattatgagga

SEQ ID NO: 45380 - DNA, 33 bp, Homo sapiens
agccaacagtacttgccgatgtcttgaatgtgg

SEQ ID NO: 45381 - DNA, 33 bp, Homo sapiens
gacctaatttcattgacgacagaagtatccact

SEQ ID NO: 45382 - DNA, 33 bp, Homo sapiens
tgtttcttcatttgtccatgcattaaccattga

SEQ ID NO: 45383 - DNA, 33 bp, Homo sapiens
tatgtttgcagattcagaaagtgcaaggtgcag

SEQ ID NO: 45384 - DNA, 33 bp, Homo sapiens
aaaaatatcttcatgacgttggaataggcaaat

SEQ ID NO: 45385 - DNA, 33 bp, Homo sapiens
aaaaagaacaaaaaaaattgctattctggccct

SEQ ID NO: 45386 - DNA, 33 bp, Homo sapiens
tagaaagcccagaaaacctagctaacccgaatc

SEQ ID NO: 45387 - DNA, 33 bp, Homo sapiens
acaaaagacatctccaatgattgcacagcacag

SEQ ID NO: 45388 - DNA, 33 bp, Homo sapiens
tataaactgtcagtaaggtgaagaaatggaaaa

SEQ ID NO: 45389 - DNA, 33 bp, Homo sapiens
tggccttgtgttgtcgcataggatcagaacctg

SEQ ID NO: 45390 - DNA, 33 bp, Homo sapiens
gcagagcttgaggaaggataattattgttgttt

SEQ ID NO: 45391 - DNA, 33 bp, Homo sapiens
tgcaggctttgaagacaggcaaagggccatgag

SEQ ID NO: 45392 - DNA, 33 bp, Homo sapiens
agggctcctgttttacaagaaaaatgcttcttt

SEQ ID NO: 45393 - DNA, 33 bp, Homo sapiens
gatgcagggggcggcaaggttcgtgacagaata

SEQ ID NO: 45394 - DNA, 33 bp, Homo sapiens
ggtcaccagtaatatcaagacttctatagcttc

SEQ ID NO: 45395 - DNA, 33 bp, Homo sapiens
gttttgcaaaagcttcagaaagaaattatggct

SEQ ID NO: 45396 - DNA, 33 bp, Homo sapiens
tggacacaatttaaggaagaaaatagtgaagca

SEQ ID NO: 45397 - DNA, 33 bp, Homo sapiens
catgagctcatactgaccaaacaaaccacccaa

SEQ ID NO: 45398 - DNA, 33 bp, Homo sapiens
gcacccattctacagacgaaaccgtgaagggac

SEQ ID NO: 45399 - DNA, 33 bp, Homo sapiens
agtgagtagctacaacactatgctgagtcccat

SEQ ID NO: 45400 - DNA, 33 bp, Homo sapiens
ttcatctttaaaacccaatgactgcaattccaa

SEQ ID NO: 45401 - DNA, 33 bp, Homo sapiens
tgactccatcgtgaaacaagcaagacccattcc

SEQ ID NO: 45402 - DNA, 33 bp, Homo sapiens
gaaggaacttcacccaactgcaggaggtaactg

SEQ ID NO: 45403 - DNA, 33 bp, Homo sapiens
caccacctttgaaacacgcttcttaaactcacc

SEQ ID NO: 45404 - DNA, 33 bp, Homo sapiens
caacatatagcagagagaagtcattcttgtacc

SEQ ID NO: 45405 - DNA, 33 bp, Homo sapiens
ctactcaaacagcaaagcctatagttgggttgc

SEQ ID NO: 45406 - DNA, 51 bp, Homo sapiens
ggcagacacagttctggcaactgagaatacagataatcctcccccaccccc

SEQ ID NO: 45407 - DNA, 33 bp, Homo sapiens
gaaaaagaaatttgcaaggaaatgtgatgactt

SEQ ID NO: 45408 - DNA, 51 bp, Homo sapiens
acatggagagattgctgaatatcgaaccatccttacattcctgggataaat

SEQ ID NO: 45409 - DNA, 51 bp, Homo sapiens
gaatcactctaagatggtcatgaaaatttcacttggaaaggcatgtggaat

SEQ ID NO: 45410 - DNA, 33 bp, Homo sapiens
gggtggaaaatgttcaatcatctgaaggaccta

SEQ ID NO: 45411 - DNA, 33 bp, Homo sapiens
tgctggcacatgagtccctgcttgagggtttat

SEQ ID NO: 45412 - DNA, 33 bp, Homo sapiens
aggggactcaggtgggacattaagagcatctgc

SEQ ID NO: 45413 - DNA, 33 bp, Homo sapiens
tggctggctgaataaacgctcggatgctcttca

SEQ ID NO: 45414 - DNA, 33 bp, Homo sapiens
agttactaaattgtgacatggaagacagcaaaa

SEQ ID NO: 45415 - DNA, 33 bp, Homo sapiens
cccctattaaatcccaatcagggttgtgagaag

SEQ ID NO: 45416 - DNA, 33 bp, Homo sapiens
atcaaggtctggttaactgcagagcctgctccc

SEQ ID NO: 45417 - DNA, 33 bp, Homo sapiens
gtcaggaccccccttacatgctgttagagaacc

SEQ ID NO: 45418 - DNA, 33 bp, Homo sapiens
cagactgggtaatataaggagactctacttcta

SEQ ID NO: 45419 - DNA, 33 bp, Homo sapiens
agagggctcgctgtaacgtttacactgcttagc

SEQ ID NO: 45420 - DNA, 33 bp, Homo sapiens
aatgaatgaataaacactgcaaatgcataaata

SEQ ID NO: 45421 - DNA, 51 bp, Homo sapiens
tgccaatattttatacgtatactaaataacagccccagtgctggagagtgg

SEQ ID NO: 45422 - DNA, 33 bp, Homo sapiens
tcctgttaaaccatcccagacatatgcagtcat

SEQ ID NO: 45423 - DNA, 33 bp, Homo sapiens
caaatcatgtattgaacggataaagcactctca

SEQ ID NO: 45424 - DNA, 33 bp, Homo sapiens
tgggtcaaaagcctcagataataatgatagcta

SEQ ID NO: 45425 - DNA, 33 bp, Homo sapiens
cacatttaagcacttaataaacatctctggcct

SEQ ID NO: 45426 - DNA, 51 bp, Homo sapiens
ataggcatgactgattaaatcatagaccttaggtgataaactcaatcttca

SEQ ID NO: 45427 - DNA, 33 bp, Homo sapiens
aggatgatatacagatcaaatgccaggtgattt

SEQ ID NO: 45428 - DNA, 33 bp, Homo sapiens
ttcatctccaaagatactacacttgtacagggt

SEQ ID NO: 45429 - DNA, 51 bp, Homo sapiens
agaaactattcttatggtaaacacagataagaggggtgttgactttctgct

SEQ ID NO: 45430 - DNA, 33 bp, Homo sapiens
tctcactgtgttttcaaatcctcagtgttttca

SEQ ID NO: 45431 - DNA, 33 bp, Homo sapiens
atttaaccagaatatcaatcatcaagccagaac

SEQ ID NO: 45432 - DNA, 33 bp, Homo sapiens
ctgtcacaggagggaactggtaaacactgtagg

SEQ ID NO: 45433 - DNA, 33 bp, Homo sapiens
ttaaacaacaataacgacaacaattataacaac

SEQ ID NO: 45434 - DNA, 33 bp, Homo sapiens
ggctaggccatccataactgcctcaatagagcc

SEQ ID NO: 45435 - DNA, 33 bp, Homo sapiens
ctggggttatgacctgaactgtactacacagga

SEQ ID NO: 45436 - DNA, 33 bp, Homo sapiens
gggttttagagtccagcccccattggctcacta

SEQ ID NO: 45437 - DNA, 33 bp, Homo sapiens
gtgaagttgagaagagccacaaatctgtaaaag

SEQ ID NO: 45438 - DNA, 33 bp, Homo sapiens
aacagtctgatttcacactgtttcataggctct

SEQ ID NO: 45439 - DNA, 33 bp, Homo sapiens
agttttgcaaaaggtacaatgcagagcgttgtc

SEQ ID NO: 45440 - DNA, 33 bp, Homo sapiens
tgtcatatgccttcccccaagctaacctacctg

SEQ ID NO: 45441 - DNA, 33 bp, Homo sapiens
gcagcattagatgacacatacattccgtcacat

SEQ ID NO: 45442 - DNA, 33 bp, Homo sapiens
atcactgccaaaaaaacacaaggaatgctgggc

SEQ ID NO: 45443 - DNA, 33 bp, Homo sapiens
tattttgatgtattcacgacggttaaaataatt

SEQ ID NO: 45444 - DNA, 51 bp, Homo sapiens
atcatttttccataacagaccttggaattcttagagagtgagtaggtgctg

SEQ ID NO: 45445 - DNA, 33 bp, Homo sapiens
tagaactggtactcaaaatgtccacagttaacc

SEQ ID NO: 45446 - DNA, 33 bp, Homo sapiens
aaatttcaactgatggaaactataagacaaatg

SEQ ID NO: 45447 - DNA, 33 bp, Homo sapiens
agaggcgctgggctcgcagcctgtttccaagaa

SEQ ID NO: 45448 - DNA, 33 bp, Homo sapiens
aggggcggggcgaggaaccaagctaagagaaca

SEQ ID NO: 45449 - DNA, 33 bp, Homo sapiens
aagaaatccatcactgaaaaatatctgaaaaat

SEQ ID NO: 45450 - DNA, 33 bp, Homo sapiens
catgtagtaaaagataaaaagcacaacatttat

SEQ ID NO: 45451 - DNA, 33 bp, Homo sapiens
cattatgggatttagcaccctaataagaagaga

SEQ ID NO: 45452 - DNA, 33 bp, Homo sapiens
acactctgcacaacaaacacccaggtatctact

SEQ ID NO: 45453 - DNA, 33 bp, Homo sapiens
gtgatgcctgggggtaagtcattcgcatatatg

SEQ ID NO: 45454 - DNA, 33 bp, Homo sapiens
cagccattccaaataaaagaaaatggcccaaag

SEQ ID NO: 45455 - DNA, 33 bp, Homo sapiens
gctttctttatcttgccatcgatgctccctaat

SEQ ID NO: 45456 - DNA, 33 bp, Homo sapiens
atatatgttacagttacgttcactgtgaatatg

SEQ ID NO: 45457 - DNA, 33 bp, Homo sapiens
aatggctttcttcccccactccaacacaatgag

SEQ ID NO: 45458 - DNA, 33 bp, Homo sapiens
ctccattagatttccacggatggctttttgggg

SEQ ID NO: 45459 - DNA, 33 bp, Homo sapiens
tcccttccctgcattacgtgacaagctccttct

SEQ ID NO: 45460 - DNA, 33 bp, Homo sapiens
tccacttttgaaccgggatccaaaaatccactt

SEQ ID NO: 45461 - DNA, 33 bp, Homo sapiens
ggttcgtattctcatccgaggtagcagaagcac

SEQ ID NO: 45462 - DNA, 33 bp, Homo sapiens
tgtagataaaggttgacggatttcattcttttt

SEQ ID NO: 45463 - DNA, 33 bp, Homo sapiens
gtcctctgtgtacccacccagtgtactctctct

SEQ ID NO: 45464 - DNA, 51 bp, Homo sapiens
caaatttcccattgtctagcctaagcaaagaatggagcatttggattaaag

SEQ ID NO: 45465 - DNA, 33 bp, Homo sapiens
ggctgttggcttcaacaaacttgtggtcaagga

SEQ ID NO: 45466 - DNA, 33 bp, Homo sapiens
gcagatttgcattttacaacttgtcatgtcaaa

SEQ ID NO: 45467 - DNA, 33 bp, Homo sapiens
tttttaaaagaatttgaattgtggctgcagggt

SEQ ID NO: 45468 - DNA, 33 bp, Homo sapiens
tgcccttgatgtaccaaagcagtgtttaccagg

SEQ ID NO: 45469 - DNA, 33 bp, Homo sapiens
gatagtaggtggctaacagaattgacaggatgg

SEQ ID NO: 45470 - DNA, 33 bp, Homo sapiens
tgtatccataagaccacagagggggaaaagaca

SEQ ID NO: 45471 - DNA, 51 bp, Homo sapiens
gttgtttataaggaagttgcaaatacacaagaaagcctatatactataaaa

SEQ ID NO: 45472 - DNA, 33 bp, Homo sapiens
gaactttattttctcaggtatagattgatagga

SEQ ID NO: 45473 - DNA, 33 bp, Homo sapiens
acaacactctcatccacgcaactatcaaatgcc

SEQ ID NO: 45474 - DNA, 33 bp, Homo sapiens
tgcttattccaaacaaagttgtagtatgaatta

SEQ ID NO: 45475 - DNA, 33 bp, Homo sapiens
attgctctaactaaccactgtccaacagaaaca

SEQ ID NO: 45476 - DNA, 33 bp, Homo sapiens
attggatggagggtaaagttttaaagtcagcac

SEQ ID NO: 45477 - DNA, 33 bp, Homo sapiens
ctgttttccaatggacagaaactttttgtaaac

SEQ ID NO: 45478 - DNA, 33 bp, Homo sapiens
ttcatataggctacaaaaaaatgtttaatatat

SEQ ID NO: 45479 - DNA, 33 bp, Homo sapiens
ggagaacacacttaacacttgaattagtaaatc

SEQ ID NO: 45480 - DNA, 33 bp, Homo sapiens
aacagagttctcaacacggcaaaatttttttat

SEQ ID NO: 45481 - DNA, 33 bp, Homo sapiens
tttattcttgtctcaacagtggcatggatggtc

SEQ ID NO: 45482 - DNA, 51 bp, Homo sapiens
gttgtaaacagatgtgctgccattcagactgttgttttatttatagagcac

SEQ ID NO: 45483 - DNA, 33 bp, Homo sapiens
gttttcttctctgtgaagttatcaatcagcaga

SEQ ID NO: 45484 - DNA, 33 bp, Homo sapiens
agtcacaagcactcttaaaaggataacacaaac

SEQ ID NO: 45485 - DNA, 33 bp, Homo sapiens
gtagaggaattgtggcagattgaataggaagtt

SEQ ID NO: 45486 - DNA, 33 bp, Homo sapiens
tttaagttcttgaaagacaatgctctgatggac

SEQ ID NO: 45487 - DNA, 33 bp, Homo sapiens
atagtatgccactaccacccaactcacattaaa

SEQ ID NO: 45488 - DNA, 51 bp, Homo sapiens
gtggaatttcccagccctaggcataccaaaagatcctttgagctttgaagg

SEQ ID NO: 45489 - DNA, 33 bp, Homo sapiens
atgtaaagaaaggaccaattttacttgcctcag

SEQ ID NO: 45490 - DNA, 33 bp, Homo sapiens
aataaatattgtagcacgaacttgaggaaacat

SEQ ID NO: 45491 - DNA, 33 bp, Homo sapiens
aaaggaaacaggaacaggaatcttgatggagga

SEQ ID NO: 45492 - DNA, 33 bp, Homo sapiens
tggagcccactactcaaggaaacaaggagctcc

SEQ ID NO: 45493 - DNA, 33 bp, Homo sapiens
aagaataacatttgaactgagagagtctgaaat

SEQ ID NO: 45494 - DNA, 33 bp, Homo sapiens
ggcctacagcaaatgaagaaatgccacaagttc

SEQ ID NO: 45495 - DNA, 33 bp, Homo sapiens
tggtggaacttttgagaccttaccatttggaga

SEQ ID NO: 45496 - DNA, 33 bp, Homo sapiens
attggaatgttcctaacgtaaagaaataataaa

SEQ ID NO: 45497 - DNA, 33 bp, Homo sapiens
gggtataaggtagagactctaaacacatggaaa

SEQ ID NO: 45498 - DNA, 33 bp, Homo sapiens
gggcagtagtacaaaaagtttcttatccagcct

SEQ ID NO: 45499 - DNA, 33 bp, Homo sapiens
cgagaaagaccatcagaaattctctgaaacaaa

SEQ ID NO: 45500 - DNA, 33 bp, Homo sapiens
acaactgctgtactaaactactccatttttagg

SEQ ID NO: 45501 - DNA, 33 bp, Homo sapiens
catttctttgctttccaagtctggatttagagg

SEQ ID NO: 45502 - DNA, 33 bp, Homo sapiens
gcttatcaacctattaactctgtattaagccct

SEQ ID NO: 45503 - DNA, 33 bp, Homo sapiens
tgtggttaacaagttaaagaaaacacattgcca

SEQ ID NO: 45504 - DNA, 51 bp, Homo sapiens
tttacccttctaaaaggcatatttgcatctctaaaggaatcttcacgtctt

SEQ ID NO: 45505 - DNA, 33 bp, Homo sapiens
attatcttttctaccacagatatatcatttgct

SEQ ID NO: 45506 - DNA, 33 bp, Homo sapiens
tagaggaatcaacaaaccactgaatcaggaaaa

SEQ ID NO: 45507 - DNA, 33 bp, Homo sapiens
tcacagagaaagagaccgaacattaaacaccat

SEQ ID NO: 45508 - DNA, 33 bp, Homo sapiens
acaatgctatcttctaccccacgtgctcttctt

SEQ ID NO: 45509 - DNA, 33 bp, Homo sapiens
gcttccaacctcctcacgaagtctgtaaagcac

SEQ ID NO: 45510 - DNA, 33 bp, Homo sapiens
attctatgaagcaaaaactaaaagggaaatcag

SEQ ID NO: 45511 - DNA, 33 bp, Homo sapiens
cctggtggtaatgaaacacactgtttatctgaa

SEQ ID NO: 45512 - DNA, 33 bp, Homo sapiens
atatatctaggcctcaatctcctcttctgtaac

SEQ ID NO: 45513 - DNA, 33 bp, Homo sapiens
agaaaaacaaataggaaagaacaagaaacatca

SEQ ID NO: 45514 - DNA, 33 bp, Homo sapiens
acatgagtgatgaaataaaatatgcaacaaacc

SEQ ID NO: 45515 - DNA, 51 bp, Homo sapiens
acacttctctactgccgaattttcccgaatgtgacttagccaccagggagt

SEQ ID NO: 45516 - DNA, 33 bp, Homo sapiens
cagttagcctttgatgcattataattgtcacaa

SEQ ID NO: 45517 - DNA, 33 bp, Homo sapiens
agtgatgtccgttagaaattttctgcactgtcc

SEQ ID NO: 45518 - DNA, 33 bp, Homo sapiens
taaatgaaatcaattaggtaaaaagcattgtaa

SEQ ID NO: 45519 - DNA, 33 bp, Homo sapiens
aatatggaagcagaaaggttaaacgatttggcc

SEQ ID NO: 45520 - DNA, 33 bp, Homo sapiens
tctcattaaatacacaatgcagtccgacagctc

SEQ ID NO: 45521 - DNA, 33 bp, Homo sapiens
aggcacacctctaggcacttggtggctgcccag

SEQ ID NO: 45522 - DNA, 33 bp, Homo sapiens
tggggctggctacaagaaagaccaagtgattag

SEQ ID NO: 45523 - DNA, 33 bp, Homo sapiens
taggttgtgcttttcacgtcaatttatttggca

SEQ ID NO: 45524 - DNA, 33 bp, Homo sapiens
gcctggaagtgacacagtgctgcttcagctcat

SEQ ID NO: 45525 - DNA, 33 bp, Homo sapiens
atattgccctgttttgaatctccgtattttgtc

SEQ ID NO: 45526 - DNA, 33 bp, Homo sapiens
tagtttgctgagtttcaattatcctggggcata

SEQ ID NO: 45527 - DNA, 33 bp, Homo sapiens
gctgcaacagctcccaatcttccccagtgagac

SEQ ID NO: 45528 - DNA, 33 bp, Homo sapiens
cacgctttgcatcataccacctggaaggaaatt

SEQ ID NO: 45529 - DNA, 33 bp, Homo sapiens
ttgtttcacagttgggacatctagcaacagttg

SEQ ID NO: 45530 - DNA, 33 bp, Homo sapiens
tcctgtgccaaaaaaaaatctcatttctcaatc

SEQ ID NO: 45531 - DNA, 51 bp, Homo sapiens
aggtcaaacttcctctctatattgccaaaccctatggtagatgcttggtaa

SEQ ID NO: 45532 - DNA, 33 bp, Homo sapiens
tgctgaggttcgaacactgctggttagagaact

SEQ ID NO: 45533 - DNA, 33 bp, Homo sapiens
tgataagaaactaagacactatgttactataag

SEQ ID NO: 45534 - DNA, 33 bp, Homo sapiens
acaatttcttggaagcccagatgtaggagaggt

SEQ ID NO: 45535 - DNA, 33 bp, Homo sapiens
tttaggtgtggattaaagagaaaatgtcttctg

SEQ ID NO: 45536 - DNA, 33 bp, Homo sapiens
caacgcagctgtggaaagaaaagaacaaaaagt

SEQ ID NO: 45537 - DNA, 33 bp, Homo sapiens
aggggcacttccatgaaagattatttggaacag

SEQ ID NO: 45538 - DNA, 33 bp, Homo sapiens
tgagtagcgttttataggtacaaattccacctc

SEQ ID NO: 45539 - DNA, 33 bp, Homo sapiens
tttcacaatcacaagcacaagtagtagacttaa

SEQ ID NO: 45540 - DNA, 33 bp, Homo sapiens
caggaaaccagatctcccaacttggagttttga

SEQ ID NO: 45541 - DNA, 33 bp, Homo sapiens
cagaacgttgtttctacgagtagagctcagaca

SEQ ID NO: 45542 - DNA, 33 bp, Homo sapiens
tatgtggcagattcaacttactagatataggca

SEQ ID NO: 45543 - DNA, 33 bp, Homo sapiens
gccatttaaaattgcgccaagcatagtactgaa

SEQ ID NO: 45544 - DNA, 33 bp, Homo sapiens
agtagaagtgggacaaaaagaaacatgactgag

SEQ ID NO: 45545 - DNA, 33 bp, Homo sapiens
gaaaagcagcaccgaaaaccctgcttatttcaa

SEQ ID NO: 45546 - DNA, 33 bp, Homo sapiens
ttcccactggttaaaaaattgtgagctaaaaat

SEQ ID NO: 45547 - DNA, 33 bp, Homo sapiens
ctaggaaataatatgcagaaattaaggagtgca

SEQ ID NO: 45548 - DNA, 33 bp, Homo sapiens
cttcacttgaatatccaactccacatatccaaa

SEQ ID NO: 45549 - DNA, 33 bp, Homo sapiens
ggttcagaaatttgacaccagacctattaaatt

SEQ ID NO: 45550 - DNA, 33 bp, Homo sapiens
tcctacttatccttcacatcaacacactctaat

SEQ ID NO: 45551 - DNA, 33 bp, Homo sapiens
aagtttttctcccacaataatgcaaggatgaac

SEQ ID NO: 45552 - DNA, 33 bp, Homo sapiens
tgaatctgtgacacaacataaatcactgtgtaa

SEQ ID NO: 45553 - DNA, 33 bp, Homo sapiens
ataagcataatacttagcacaattcctggcagt

SEQ ID NO: 45554 - DNA, 33 bp, Homo sapiens
agttaaagttttttcaagatctcataatcctaa

SEQ ID NO: 45555 - DNA, 33 bp, Homo sapiens
tataatggatcaagaaagacactacatcactgc

SEQ ID NO: 45556 - DNA, 33 bp, Homo sapiens
gctgagatgattgtttaaaaatggttccaagtt

SEQ ID NO: 45557 - DNA, 33 bp, Homo sapiens
aggctgcacccaggaacgaatgtgatcttggaa

SEQ ID NO: 45558 - DNA, 51 bp, Homo sapiens
aaaaatcctctttgcaactccattgaattgtacataaacaagtcaagaaag

SEQ ID NO: 45559 - DNA, 33 bp, Homo sapiens
ggtcaatgaggctgaaaaagccatgaataattt

SEQ ID NO: 45560 - DNA, 33 bp, Homo sapiens
agtggtaactggcttacagcttaacctcactgc

SEQ ID NO: 45561 - DNA, 33 bp, Homo sapiens
ttagttctataaacccagggactgagttttcaa

SEQ ID NO: 45562 - DNA, 33 bp, Homo sapiens
ctgcagtctgccttacaggtagtgtgctctatc

SEQ ID NO: 45563 - DNA, 33 bp, Homo sapiens
tcatgatacgtgctaacgaagggaaatgtaggt

SEQ ID NO: 45564 - DNA, 33 bp, Homo sapiens
ccaatgacggacaggaaggggcgaacaaatacc

SEQ ID NO: 45565 - DNA, 33 bp, Homo sapiens
tttatatattccacaccgtagattataaattga

SEQ ID NO: 45566 - DNA, 51 bp, Homo sapiens
cagatcatagtagtggtagtccttacgcattatggtaaatgctttccacgt

SEQ ID NO: 45567 - DNA, 51 bp, Homo sapiens
ttccttcttctcctacatatatccaatatcctcatggtttctttctaatca

SEQ ID NO: 45568 - DNA, 51 bp, Homo sapiens
tggacaatgaacaatgcagtaataaagtgggcgttcatagccacatgtaat

SEQ ID NO: 45569 - DNA, 51 bp, Homo sapiens
aaaatgctttggaataaagatttggccagattcaaggtttaaactccacac

SEQ ID NO: 45570 - DNA, 33 bp, Homo sapiens
ccagccatcccagaggaaagagccaacctgtta

SEQ ID NO: 45571 - DNA, 33 bp, Homo sapiens
acactcagagcaaaataaaacataaaccataat

SEQ ID NO: 45572 - DNA, 33 bp, Homo sapiens
aactcagattgcaccacaagagtctgctatcca

SEQ ID NO: 45573 - DNA, 33 bp, Homo sapiens
ggagtatatgttggaaacagtggcaattgctta

SEQ ID NO: 45574 - DNA, 33 bp, Homo sapiens
tctaattttatccaaacagccattagaagttct

SEQ ID NO: 45575 - DNA, 33 bp, Homo sapiens
ttaatcacttgggtaccggagaaatcattttga

SEQ ID NO: 45576 - DNA, 51 bp, Homo sapiens
acagcactgttagcaatgttatccacgtgcttaaaattaaacacaacccct

SEQ ID NO: 45577 - DNA, 33 bp, Homo sapiens
attcagccagactcgaaaagacaatgacctgcc

SEQ ID NO: 45578 - DNA, 33 bp, Homo sapiens
ttgaagaatgagaaaactttgtggttgtttttg

SEQ ID NO: 45579 - DNA, 33 bp, Homo sapiens
catcatgataaacatccctctcgaaaataagca

SEQ ID NO: 45580 - DNA, 33 bp, Homo sapiens
gaaagtgtctctttccccttctcctcttcttta

SEQ ID NO: 45581 - DNA, 33 bp, Homo sapiens
gcttactttatctcaccacaattttgttcatgg

SEQ ID NO: 45582 - DNA, 33 bp, Homo sapiens
aatgtgttgaaaaaccaggtgcattaggtgcct

SEQ ID NO: 45583 - DNA, 33 bp, Homo sapiens
aaatcactgtcccttcactttacccacaaacgt

SEQ ID NO: 45584 - DNA, 33 bp, Homo sapiens
tcagagcttggctgaaatctgaaccccagctgc

SEQ ID NO: 45585 - DNA, 33 bp, Homo sapiens
aggataaatttgtggacaagtgacaggacaaat

SEQ ID NO: 45586 - DNA, 33 bp, Homo sapiens
gcatcaggaaacagagaagcataagacggtaga

SEQ ID NO: 45587 - DNA, 51 bp, Homo sapiens
tctacactgcctgcaagaatgttcgaccctagcagctgagggtgacactga

SEQ ID NO: 45588 - DNA, 33 bp, Homo sapiens
ttaaaacaacagcaaacatttatttagctcatg

SEQ ID NO: 45589 - DNA, 51 bp, Homo sapiens
atgaacatgtttttcaaatacaaatcgacaatccagagcctatacctcagc

SEQ ID NO: 45590 - DNA, 51 bp, Homo sapiens
tctaagggccgctgtcatcatacccagacatggttgcctttactgcactag

SEQ ID NO: 45591 - DNA, 51 bp, Homo sapiens
ccccgaagtcacaaggtgtttttgcatagcttgtcccatttgccggaaaac

SEQ ID NO: 45592 - DNA, 51 bp, Homo sapiens
agctctgcaatttgtgtttcaatgacaactctagggcaggagcctccaacc

SEQ ID NO: 45593 - DNA, 33 bp, Homo sapiens
tttggaggtatgtggaagactttttaatccttc

SEQ ID NO: 45594 - DNA, 33 bp, Homo sapiens
gaacttgatacgcagcccccccaaactttggag

SEQ ID NO: 45595 - DNA, 33 bp, Homo sapiens
attaagtgaaataagccagcaacagaaagacaa

SEQ ID NO: 45596 - DNA, 33 bp, Homo sapiens
ttatggtggactgtgcaaaaatggccacaatac

SEQ ID NO: 45597 - DNA, 33 bp, Homo sapiens
agacaaataacactgacgactgaattcctcaga

SEQ ID NO: 45598 - DNA, 33 bp, Homo sapiens
ctgcattaattccatacctgccccctgaacagc

SEQ ID NO: 45599 - DNA, 33 bp, Homo sapiens
cttcgctaatgcacaacgaaccctcacttccaa

SEQ ID NO: 45600 - DNA, 33 bp, Homo sapiens
tgtgacattttcaatcacttctaacagcactgg

SEQ ID NO: 45601 - DNA, 33 bp, Homo sapiens
acaaatcaaattgccaagctggtgtttcagaac

SEQ ID NO: 45602 - DNA, 33 bp, Homo sapiens
gaatcaaaacctctgaacctggacatcattttt

SEQ ID NO: 45603 - DNA, 33 bp, Homo sapiens
tgtacacatttggtcaagtatatgcctaggaaa

SEQ ID NO: 45604 - DNA, 33 bp, Homo sapiens
gtttaatgtgtacttacagcttttctcattgct

SEQ ID NO: 45605 - DNA, 33 bp, Homo sapiens
cggaagtacaacaaccagatcagaagtgtaaaa

SEQ ID NO: 45606 - DNA, 33 bp, Homo sapiens
tacccaccacatttagcatctgttacagccaac

SEQ ID NO: 45607 - DNA, 33 bp, Homo sapiens
ctctttgccgaagtgaaatactgcatatgaaac

SEQ ID NO: 45608 - DNA, 33 bp, Homo sapiens
tctctgccttcttcaccatttaggaagtattct

SEQ ID NO: 45609 - DNA, 33 bp, Homo sapiens
gctagaagttggtagcaccagggtttgaagcag

SEQ ID NO: 45610 - DNA, 33 bp, Homo sapiens
tcagcgtgtgtaaaaacggttgtggtggcttta

SEQ ID NO: 45611 - DNA, 33 bp, Homo sapiens
aacaccacctctccgaatatagtcatcagtgag

SEQ ID NO: 45612 - DNA, 33 bp, Homo sapiens
tgaaaatgaccttaaactacagactgatcctga

SEQ ID NO: 45613 - DNA, 33 bp, Homo sapiens
ccattttgcggtggaccattgatctgaagaatg

SEQ ID NO: 45614 - DNA, 33 bp, Homo sapiens
aattgatgcactacaacgctttttactgcttca

SEQ ID NO: 45615 - DNA, 33 bp, Homo sapiens
tctataatagaaaaaggctggatgcacatagga

SEQ ID NO: 45616 - DNA, 33 bp, Homo sapiens
ttctcatttctcaagccctcattcagagcctta

SEQ ID NO: 45617 - DNA, 33 bp, Homo sapiens
cagagggagacggcacaaggttgagcatctaag

SEQ ID NO: 45618 - DNA, 33 bp, Homo sapiens
aaaaaagcaaagaagacgtatgcgggtttctgc

SEQ ID NO: 45619 - DNA, 33 bp, Homo sapiens
aagggaacattcaagccgcgatgttcagaaagt

SEQ ID NO: 45620 - DNA, 33 bp, Homo sapiens
tgcatggtggtgacaagtattgacatggcaaag

SEQ ID NO: 45621 - DNA, 33 bp, Homo sapiens
tggatctgactcataacggtcaacctcagaatg

SEQ ID NO: 45622 - DNA, 33 bp, Homo sapiens
acagaggcttaggacaacagaaagacttaccca

SEQ ID NO: 45623 - DNA, 33 bp, Homo sapiens
taacaacgaagaagaaaagttgattgtgctttt

SEQ ID NO: 45624 - DNA, 51 bp, Homo sapiens
tataagcaataactataaattattgatgagtaaagagaaatcatcttagag

SEQ ID NO: 45625 - DNA, 33 bp, Homo sapiens
aggacctacacttgtaacaatgactctgtaata

SEQ ID NO: 45626 - DNA, 33 bp, Homo sapiens
cccaccataggtgctcacttaagctgagccctt

SEQ ID NO: 45627 - DNA, 33 bp, Homo sapiens
attcagaatgaggctacggaaagtgaagatgtc

SEQ ID NO: 45628 - DNA, 33 bp, Homo sapiens
aaaccagatgagaaaaggcacaagacgctgtac

SEQ ID NO: 45629 - DNA, 33 bp, Homo sapiens
gtagatagcaaatcaccataaccacggtcatgg

SEQ ID NO: 45630 - DNA, 33 bp, Homo sapiens
agtccagtaccagccaatgacaagataaacatg

SEQ ID NO: 45631 - DNA, 33 bp, Homo sapiens
gctgagcaaagtagtgcaatatgacaatgtttt

SEQ ID NO: 45632 - DNA, 33 bp, Homo sapiens
gaattgctagcaaccgccaggaagtaggaagag

SEQ ID NO: 45633 - DNA, 33 bp, Homo sapiens
tgcatagcaggcaaataaataaacaaaatgaga

SEQ ID NO: 45634 - DNA, 33 bp, Homo sapiens
caagtgaaataggaaaatgtacaccacgctgga

SEQ ID NO: 45635 - DNA, 33 bp, Homo sapiens
ccttctgtggcctctcaagaacagaagagatca

SEQ ID NO: 45636 - DNA, 33 bp, Homo sapiens
tgctggtggcaggagcaacatctatcttgttcc

SEQ ID NO: 45637 - DNA, 33 bp, Homo sapiens
ctaattataatggagggacagcatatcccagta

SEQ ID NO: 45638 - DNA, 33 bp, Homo sapiens
tggtagaaagcagggaaagagggagacagggta

SEQ ID NO: 45639 - DNA, 33 bp, Homo sapiens
aaaacttcgtggataactatgaaagtcaaagat

SEQ ID NO: 45640 - DNA, 33 bp, Homo sapiens
ccactcatcttgctcaccggatgtcgctataaa

SEQ ID NO: 45641 - DNA, 33 bp, Homo sapiens
tgtgatgaaatcttccagcaaggcctcttgagg

SEQ ID NO: 45642 - DNA, 33 bp, Homo sapiens
ccgttaacgaagaccaacatcactgtcttcaga

SEQ ID NO: 45643 - DNA, 33 bp, Homo sapiens
atagaaccagcattcaaaatagtgattgttcct

SEQ ID NO: 45644 - DNA, 33 bp, Homo sapiens
gcttcttgttcaaaaacgagaaatgtgtaaaac

SEQ ID NO: 45645 - DNA, 33 bp, Homo sapiens
accaaagacaacttaactggggaagctgcagca

SEQ ID NO: 45646 - DNA, 33 bp, Homo sapiens
ccgaactgagtagttacagagaccacatggcca

SEQ ID NO: 45647 - DNA, 33 bp, Homo sapiens
gcctatgatttgaaggcaagttgctccctataa

SEQ ID NO: 45648 - DNA, 33 bp, Homo sapiens
ggctgcatgaatcacaatgatgtcttctccaga

SEQ ID NO: 45649 - DNA, 33 bp, Homo sapiens
gtggctgtgcttgtccagaacagtaggcatggg

SEQ ID NO: 45650 - DNA, 33 bp, Homo sapiens
acacctgaggactccaagtatttatgatttagg

SEQ ID NO: 45651 - DNA, 33 bp, Homo sapiens
aaacacattctgtctaaggtggggtcatcagga

SEQ ID NO: 45652 - DNA, 33 bp, Homo sapiens
gttatagatgccacccaggattatcctatcctc

SEQ ID NO: 45653 - DNA, 33 bp, Homo sapiens
taaatagatagcgatcaatgtgtggttctttcc

SEQ ID NO: 45654 - DNA, 33 bp, Homo sapiens
gtcagttctgggtggaagccgtggtccagagtg

SEQ ID NO: 45655 - DNA, 33 bp, Homo sapiens
ttctgcatctgttgaacgtaagggggaggtagc

SEQ ID NO: 45656 - DNA, 33 bp, Homo sapiens
tcacattcccctgttacgagctgagccctggag

SEQ ID NO: 45657 - DNA, 51 bp, Homo sapiens
tccttaagtagtgaaatcacatctgatacagaagctgcaattggagtcaac

SEQ ID NO: 45658 - DNA, 33 bp, Homo sapiens
aagaagatccttctcaaatgttgtgtcattcat

SEQ ID NO: 45659 - DNA, 33 bp, Homo sapiens
ctgattttcttccataacgctgttccttacctc

SEQ ID NO: 45660 - DNA, 33 bp, Homo sapiens
caatcctcagtgttgacagaagtgctagaaggc

SEQ ID NO: 45661 - DNA, 33 bp, Homo sapiens
aagaggaataccagataactaggaaatgctaac

SEQ ID NO: 45662 - DNA, 51 bp, Homo sapiens
ggtccctgctgtgtctcggcactgacggcaatgtgtacaaagcaacaagtg

SEQ ID NO: 45663 - DNA, 33 bp, Homo sapiens
atctgtaaaatgggcacgataaaaagatcccta

SEQ ID NO: 45664 - DNA, 33 bp, Homo sapiens
ctttagcttctctgggaaaccaaacatttcctg

SEQ ID NO: 45665 - DNA, 33 bp, Homo sapiens
aatgatggggaattgcgagtggacgatgacaga

SEQ ID NO: 45666 - DNA, 33 bp, Homo sapiens
ggggtcccttttctccactccaaagataccaca

SEQ ID NO: 45667 - DNA, 33 bp, Homo sapiens
tccctccaaggcatccaccacaattgcaaccgt

SEQ ID NO: 45668 - DNA, 33 bp, Homo sapiens
cttgattttgagtgctcacacctcgatcttgaa

SEQ ID NO: 45669 - DNA, 33 bp, Homo sapiens
cgctcaaacacacgcaaaagctttggtctcaat

SEQ ID NO: 45670 - DNA, 33 bp, Homo sapiens
gagatagatccacgtacgcatggtcaattgaat

SEQ ID NO: 45671 - DNA, 33 bp, Homo sapiens
cactgtgggccaaacacggaccgagggctttcc

SEQ ID NO: 45672 - DNA, 33 bp, Homo sapiens
aggtcacgttggttggcaaaggtgtctgagcct

SEQ ID NO: 45673 - DNA, 33 bp, Homo sapiens
tcgagggtgagatgaactaaaagactggaatgt

SEQ ID NO: 45674 - DNA, 33 bp, Homo sapiens
tggaccgtgggcttcaagtgtgttattaacccc

SEQ ID NO: 45675 - DNA, 33 bp, Homo sapiens
ttcaattcgctctgcacgtactgagcacctgct

SEQ ID NO: 45676 - DNA, 33 bp, Homo sapiens
gagtgacagaacaagaacctagctcaaaaaata

SEQ ID NO: 45677 - DNA, 33 bp, Homo sapiens
ttcctgcatgactgataataggatacactgggg

SEQ ID NO: 45678 - DNA, 33 bp, Homo sapiens
tggtaggacttaggaagatttgatggtcaaggc

SEQ ID NO: 45679 - DNA, 33 bp, Homo sapiens
agagaaatgggccaaacgactcaggtaagttgc

SEQ ID NO: 45680 - DNA, 33 bp, Homo sapiens
ctgaaagtatgtttcaaagtcagttaacatgat

SEQ ID NO: 45681 - DNA, 33 bp, Homo sapiens
tattttgtaagataaacgtctttcaccaggaga

SEQ ID NO: 45682 - DNA, 33 bp, Homo sapiens
gacattggagccttgccccgccaccgagctgcg

SEQ ID NO: 45683 - DNA, 33 bp, Homo sapiens
actgtaccaggaattacactttgctcatgatac

SEQ ID NO: 45684 - DNA, 33 bp, Homo sapiens
ataaataaataaaattaaaatacgccacttata

SEQ ID NO: 45685 - DNA, 33 bp, Homo sapiens
gagaagcaattagaaccgtaacaatggaagtaa

SEQ ID NO: 45686 - DNA, 33 bp, Homo sapiens
cggagtcacctggggacaatggtcagaggtcag

SEQ ID NO: 45687 - DNA, 33 bp, Homo sapiens
ggtatgaaggaagttaaggaaactagctggtaa

SEQ ID NO: 45688 - DNA, 33 bp, Homo sapiens
acaggaattaatttgaaaggactaccaatggtc

SEQ ID NO: 45689 - DNA, 51 bp, Homo sapiens
acctaaacacgtggctctgactctcggagactactctgtttctcagcatct

SEQ ID NO: 45690 - DNA, 33 bp, Homo sapiens
tgggcttgtgacttaccatggcggccacagcca

SEQ ID NO: 45691 - DNA, 51 bp, Homo sapiens
ttgatggagcaaacatgatgttcttattccaatccatcatgattcttacaa

SEQ ID NO: 45692 - DNA, 51 bp, Homo sapiens
gctatttgctgggctccccaggcaaaaagaaggcataataattgtcaatat

SEQ ID NO: 45693 - DNA, 51 bp, Homo sapiens
actatgtcagtgaataaaagttcctcaatgccaagcaatggcttacacctg

SEQ ID NO: 45694 - DNA, 33 bp, Homo sapiens
ccttgttcctggcacaatgcttaatgtcctaaa

SEQ ID NO: 45695 - DNA, 33 bp, Homo sapiens
ttctccatctgtgaaactgactggagatcagca

SEQ ID NO: 45696 - DNA, 33 bp, Homo sapiens
gatgattcccggatgactaaagcacattacatt

SEQ ID NO: 45697 - DNA, 33 bp, Homo sapiens
gcaaaactctttccccagaagtgacagctatat

SEQ ID NO: 45698 - DNA, 33 bp, Homo sapiens
atgctgttagccacatcataactggtggtagaa

SEQ ID NO: 45699 - DNA, 33 bp, Homo sapiens
gaagcctgtggtttaaatcctatattctagcta

SEQ ID NO: 45700 - DNA, 33 bp, Homo sapiens
tatgtattaaagataaatcctagtcagtacata

SEQ ID NO: 45701 - DNA, 33 bp, Homo sapiens
ttaagtctgttcatctcaacagggttccccaga

SEQ ID NO: 45702 - DNA, 33 bp, Homo sapiens
tgaggactttctcatcacacatcaacaaagaaa

SEQ ID NO: 45703 - DNA, 33 bp, Homo sapiens
gcttcttcaagaaagacactacatggattccct

SEQ ID NO: 45704 - DNA, 33 bp, Homo sapiens
tttgccattataatgaacacctcctgtgagcac

SEQ ID NO: 45705 - DNA, 33 bp, Homo sapiens
ttttctgccctgccaactaaaacatttgccagc

SEQ ID NO: 45706 - DNA, 33 bp, Homo sapiens
gaggcaatagagactacgtgaaaaagagaaacc

SEQ ID NO: 45707 - DNA, 33 bp, Homo sapiens
ataactctgtttccccccggttggtcttttgtg

SEQ ID NO: 45708 - DNA, 33 bp, Homo sapiens
aaatattcccttcaccgagcaaaatgaatataa

SEQ ID NO: 45709 - DNA, 33 bp, Homo sapiens
ccaggctctgactttacggtgtgtagaccttaa

SEQ ID NO: 45710 - DNA, 33 bp, Homo sapiens
catcgcatcagtaccaatgggaatagagcagcc

SEQ ID NO: 45711 - DNA, 33 bp, Homo sapiens
agattgacactggtccaacactatttaccgaac

SEQ ID NO: 45712 - DNA, 33 bp, Homo sapiens
tatttaccgaactacgaacttcatggatgtcgc

SEQ ID NO: 45713 - DNA, 33 bp, Homo sapiens
tcagttggctctaagacggtgtaggatggctgc

SEQ ID NO: 45714 - DNA, 33 bp, Homo sapiens
taaaatgctggaagaaagtattaaaaaagtatt

SEQ ID NO: 45715 - DNA, 33 bp, Homo sapiens
ttccaaattagctcaaaatctcagggtaggaca

SEQ ID NO: 45716 - DNA, 33 bp, Homo sapiens
actccagactaagctcaatcaatttctctaagc

SEQ ID NO: 45717 - DNA, 33 bp, Homo sapiens
ttaaatgacttatccaatactataatcaaaacc

SEQ ID NO: 45718 - DNA, 33 bp, Homo sapiens
gttcatccttgacacacgtatctgcttttgact

SEQ ID NO: 45719 - DNA, 33 bp, Homo sapiens
tatgtggaccattcaggatgaccttttgttaag

SEQ ID NO: 45720 - DNA, 51 bp, Homo sapiens
aactgcattggttcttgggatttgaataaagtggctatttctagagttggg

SEQ ID NO: 45721 - DNA, 33 bp, Homo sapiens
aatggaaacagctaaaagggcatgaccctgtct

SEQ ID NO: 45722 - DNA, 33 bp, Homo sapiens
cattaaactcagaagcaatgtcgcttggattcc

SEQ ID NO: 45723 - DNA, 33 bp, Homo sapiens
atcatcagagcggagaaatgaggaagttcatct

SEQ ID NO: 45724 - DNA, 33 bp, Homo sapiens
aggagatgaagcaagaaattagcaactgtagaa

SEQ ID NO: 45725 - DNA, 33 bp, Homo sapiens
gcctggtgttgacttcaaacctcctggttgaag

SEQ ID NO: 45726 - DNA, 33 bp, Homo sapiens
ggaggcaagtgtcacaaatttcctgagaaggtg

SEQ ID NO: 45727 - DNA, 33 bp, Homo sapiens
tcttgccagtgtgaataagaattaaaatgatat

SEQ ID NO: 45728 - DNA, 33 bp, Homo sapiens
ccctgggattcttagaccctacttaaacctgtt

SEQ ID NO: 45729 - DNA, 33 bp, Homo sapiens
cattttacgtgcattcgctcattcaaccctcac

SEQ ID NO: 45730 - DNA, 33 bp, Homo sapiens
aataaagtgtcacagactcactcccagagagtc

SEQ ID NO: 45731 - DNA, 33 bp, Homo sapiens
ggcttatgccctttaaaaaaatccctttgctgt

SEQ ID NO: 45732 - DNA, 33 bp, Homo sapiens
tagcagatggtggaaccgacatttgattccaga

SEQ ID NO: 45733 - DNA, 33 bp, Homo sapiens
ggtgccaaaaggatgacaaaagccttgtgagtg

SEQ ID NO: 45734 - DNA, 51 bp, Homo sapiens
ataggttggcagttgttgaagatgacggagtgagttggtgtggagggaaga

SEQ ID NO: 45735 - DNA, 33 bp, Homo sapiens
tgatgaaaaaactcaaatgattgacagatttaa

SEQ ID NO: 45736 - DNA, 33 bp, Homo sapiens
ggcacataggtcagcacattaggcttaacaaca

SEQ ID NO: 45737 - DNA, 33 bp, Homo sapiens
ccttagaatagaatctgaatgccttgctatgcc

SEQ ID NO: 45738 - DNA, 33 bp, Homo sapiens
gccttgctgcacagaacttccaaatgtggctct

SEQ ID NO: 45739 - DNA, 33 bp, Homo sapiens
tccttgcaatgctaagactctaccaatctacta

SEQ ID NO: 45740 - DNA, 33 bp, Homo sapiens
taccacaatcaggcccaagcaagtgtgagtcag

SEQ ID NO: 45741 - DNA, 33 bp, Homo sapiens
ctgtctgggtaaagaacaaatgggtggtggaat

SEQ ID NO: 45742 - DNA, 33 bp, Homo sapiens
tgtgatgtgagttgtaaaatttaaaaataaaat

SEQ ID NO: 45743 - DNA, 33 bp, Homo sapiens
aaagtgcatggctacaatgaggggtgagatttt

SEQ ID NO: 45744 - DNA, 33 bp, Homo sapiens
tgcctccctggtgactgacttcttcactgtttt

SEQ ID NO: 45745 - DNA, 33 bp, Homo sapiens
gcctccttttaatgtccagaccagcatttctca

SEQ ID NO: 45746 - DNA, 33 bp, Homo sapiens
atttgagtcattccaaattcaccaaagcattaa

SEQ ID NO: 45747 - DNA, 33 bp, Homo sapiens
atataatatgcttgcagtattcctgtattttcc

SEQ ID NO: 45748 - DNA, 33 bp, Homo sapiens
ctagcatcattaacataacttgcaggcatgtta

SEQ ID NO: 45749 - DNA, 33 bp, Homo sapiens
aaccttttggtatgtcacatcttactcaccttt

SEQ ID NO: 45750 - DNA, 33 bp, Homo sapiens
tacaggaaagtcagtagagaattggagattagt

SEQ ID NO: 45751 - DNA, 33 bp, Homo sapiens
tgctttgcccaaaggacctgtgagcatgaataa

SEQ ID NO: 45752 - DNA, 33 bp, Homo sapiens
aacaattggagtgtaaagagatcctgattcaac

SEQ ID NO: 45753 - DNA, 33 bp, Homo sapiens
cactttaggcagccggcaatcctcctaatctca

SEQ ID NO: 45754 - DNA, 33 bp, Homo sapiens
cacacaaatacaccagaaatgtttacctatgta

SEQ ID NO: 45755 - DNA, 33 bp, Homo sapiens
gtaactttccagcctgcatctggttatgattgc

SEQ ID NO: 45756 - DNA, 33 bp, Homo sapiens
ttttcctcgcagatcaagaattcccaaaggaac

SEQ ID NO: 45757 - DNA, 33 bp, Homo sapiens
tctgaaggattgagtaagaggtgctccaaaggg

SEQ ID NO: 45758 - DNA, 33 bp, Homo sapiens
gtgttaaagtaccaaaagctccaatttactaag

SEQ ID NO: 45759 - DNA, 33 bp, Homo sapiens
aatttgcgttttcaaaacaagagttgtagtgga

SEQ ID NO: 45760 - DNA, 33 bp, Homo sapiens
tgattaaactttctacaatttatgcgcaacact

SEQ ID NO: 45761 - DNA, 33 bp, Homo sapiens
agtatgtacttaagctcaagtctcatcattgat

SEQ ID NO: 45762 - DNA, 33 bp, Homo sapiens
aacatttgaattaacaatccttgctgtgtgtgt

SEQ ID NO: 45763 - DNA, 33 bp, Homo sapiens
ggtgactcatagacccaatatggtgagaagaat

SEQ ID NO: 45764 - DNA, 33 bp, Homo sapiens
cctgaaattgtctatcagaagctattaatagct

SEQ ID NO: 45765 - DNA, 33 bp, Homo sapiens
tctccattcaaatccactccttcacttattcta

SEQ ID NO: 45766 - DNA, 33 bp, Homo sapiens
acagtgctgggcactgaacatggttatcttgac

SEQ ID NO: 45767 - DNA, 33 bp, Homo sapiens
cctgttgtacccacacccataagaggataagat

SEQ ID NO: 45768 - DNA, 33 bp, Homo sapiens
aaaaaataaatggctacatgactgagcaaactc

SEQ ID NO: 45769 - DNA, 33 bp, Homo sapiens
gtcactgtcctttttacagggtgctggttgaga

SEQ ID NO: 45770 - DNA, 33 bp, Homo sapiens
attctgccttgagacaacttcgagggacaaaca

SEQ ID NO: 45771 - DNA, 51 bp, Homo sapiens
ctcctctccttctttgcttccatccatcaacccatttgctgaagaagaaaa

SEQ ID NO: 45772 - DNA, 33 bp, Homo sapiens
ctgtatgaggttggaaagccttattaacatcgt

SEQ ID NO: 45773 - DNA, 33 bp, Homo sapiens
aaatccagttaccccaaacccatttgttgaaga

SEQ ID NO: 45774 - DNA, 33 bp, Homo sapiens
ccatcttaatagtgccagataattgacaaattt

SEQ ID NO: 45775 - DNA, 33 bp, Homo sapiens
agcagttctttctgcccggaacgcccttcccca

SEQ ID NO: 45776 - DNA, 33 bp, Homo sapiens
ctagaagactataccccgcgcttaacagtagtt

SEQ ID NO: 45777 - DNA, 33 bp, Homo sapiens
taccaataatgatcaacgttctaagttccacat

SEQ ID NO: 45778 - DNA, 33 bp, Homo sapiens
cactgtacctaaagaaaaagataaaagagtaga

SEQ ID NO: 45779 - DNA, 51 bp, Homo sapiens
ccttcggcggtaggaactatggcaccctcagagtttatcacctatgtaacc

SEQ ID NO: 45780 - DNA, 33 bp, Homo sapiens
tcagatcagaaaataacaacagcttggctgggc

SEQ ID NO: 45781 - DNA, 33 bp, Homo sapiens
cctggactctggactaataacatacagaattta

SEQ ID NO: 45782 - DNA, 33 bp, Homo sapiens
gagagcaaatgtacagaacctgcaagcccccta

SEQ ID NO: 45783 - DNA, 33 bp, Homo sapiens
caacatacatccatgaacaattttagatggcag

SEQ ID NO: 45784 - DNA, 33 bp, Homo sapiens
ctcactcagacctaacaaagcataacttacagg

SEQ ID NO: 45785 - DNA, 51 bp, Homo sapiens
cagtatctttctgaaggaactaatagaacctaggccatgccccttacagct

SEQ ID NO: 45786 - DNA, 33 bp, Homo sapiens
gactcatatatccaacaagtccctggatgttta

SEQ ID NO: 45787 - DNA, 51 bp, Homo sapiens
gtcatctctatccccatctcttggcctcaacctgtcctggcccatggggct

SEQ ID NO: 45788 - DNA, 33 bp, Homo sapiens
tgacagacgtttcccacagtgcgggcacaaagt

SEQ ID NO: 45789 - DNA, 33 bp, Homo sapiens
gggaatgaagccttgaacttgggcaatctgact

SEQ ID NO: 45790 - DNA, 51 bp, Homo sapiens
aaaaaaaaaaaaaaaaaaagcctccaaaagaatgcccaagaaattggtaac

SEQ ID NO: 45791 - DNA, 33 bp, Homo sapiens
tgttcatttttcctcaagttcagcaatatttaa

SEQ ID NO: 45792 - DNA, 33 bp, Homo sapiens
atcttctcttatgtaactgctaacatcaaagtt

SEQ ID NO: 45793 - DNA, 33 bp, Homo sapiens
atgtccacctcgaacaatcatagggactcagct

SEQ ID NO: 45794 - DNA, 33 bp, Homo sapiens
tcagttatggtttcaaattatgttgctgtacat

SEQ ID NO: 45795 - DNA, 33 bp, Homo sapiens
tcttctgttaaaaatcactttgaccatccatag

SEQ ID NO: 45796 - DNA, 33 bp, Homo sapiens
ggagagtctcagtagacattggcatcttagggt

SEQ ID NO: 45797 - DNA, 33 bp, Homo sapiens
tcccggtagagtcacaagatgcacttaattctt

SEQ ID NO: 45798 - DNA, 33 bp, Homo sapiens
cttatgctgggtcataaaaacagtcagaactag

SEQ ID NO: 45799 - DNA, 33 bp, Homo sapiens
gatgattgctggtttcccttacacatagcagag

SEQ ID NO: 45800 - DNA, 33 bp, Homo sapiens
acgtgtgtaaccatgggagacgacaaaagtatg

SEQ ID NO: 45801 - DNA, 33 bp, Homo sapiens
ccaggcaactctttacactgctgcgattctctt

SEQ ID NO: 45802 - DNA, 33 bp, Homo sapiens
ataaccgttttaagtgaatatcagtactttaat

SEQ ID NO: 45803 - DNA, 33 bp, Homo sapiens
actgagattgaaggaacagatttgggggatgag

SEQ ID NO: 45804 - DNA, 33 bp, Homo sapiens
cagaggcaggtcttctaactaagaaatggatat

SEQ ID NO: 45805 - DNA, 33 bp, Homo sapiens
catgctgagcgcactgaaggacagaatccagtg

SEQ ID NO: 45806 - DNA, 33 bp, Homo sapiens
agaaacaggcagcaccaaggaatgagctcacct

SEQ ID NO: 45807 - DNA, 33 bp, Homo sapiens
ctcctaccttccataacgggtttgctcatccat

SEQ ID NO: 45808 - DNA, 33 bp, Homo sapiens
aatggggaggcaactacgaaatcaacagtggga

SEQ ID NO: 45809 - DNA, 33 bp, Homo sapiens
gttgaatcctctcaacaacactatggagcgggt

SEQ ID NO: 45810 - DNA, 33 bp, Homo sapiens
ggtatgtaggaagcacacaataaatgcacctct

SEQ ID NO: 45811 - DNA, 33 bp, Homo sapiens
ggtgtggctactccaccccttgcttctcctcct

SEQ ID NO: 45812 - DNA, 33 bp, Homo sapiens
agtgatttactatgcaacaatggattattgaaa

SEQ ID NO: 45813 - DNA, 33 bp, Homo sapiens
tttaacatttacttctcaatactgtcttttcct

SEQ ID NO: 45814 - DNA, 33 bp, Homo sapiens
cagcaactcccccggcactagacgagctctatc

SEQ ID NO: 45815 - DNA, 33 bp, Homo sapiens
cgtgcagttagcaccaactcctaccatcactgc

SEQ ID NO: 45816 - DNA, 33 bp, Homo sapiens
ttgaagttgtttgtgaacagaaatttaactccc

SEQ ID NO: 45817 - DNA, 33 bp, Homo sapiens
ggcatgaaaatattcgccaattataggagagtt

SEQ ID NO: 45818 - DNA, 33 bp, Homo sapiens
ctgcattttgtgttcaccgcctggccctggtgg

SEQ ID NO: 45819 - DNA, 33 bp, Homo sapiens
tttaatgaatggcagcgccggctcctcccgctt

SEQ ID NO: 45820 - DNA, 33 bp, Homo sapiens
tgagccaacattcaagactcaaattattttaca

SEQ ID NO: 45821 - DNA, 33 bp, Homo sapiens
gatgaaaaccagtgccaaatggaaatgcaaatc

SEQ ID NO: 45822 - DNA, 51 bp, Homo sapiens
gcctgaccccagagctttacggtgaatcacagcctgtccctgtccctggat

SEQ ID NO: 45823 - DNA, 33 bp, Homo sapiens
tataggcacacaaataggtagaactggggaatc

SEQ ID NO: 45824 - DNA, 33 bp, Homo sapiens
aacctacctgtggcatcaccagactcggaaagt

SEQ ID NO: 45825 - DNA, 33 bp, Homo sapiens
cctggaatgtggtaagaactgtgtaagagttag

SEQ ID NO: 45826 - DNA, 33 bp, Homo sapiens
acttaatttaccaacacatccggagtgtatttt

SEQ ID NO: 45827 - DNA, 33 bp, Homo sapiens
ttaatctcgcaagcacagggagtttctgccatc

SEQ ID NO: 45828 - DNA, 33 bp, Homo sapiens
tctagcagattctttcacacctagtcccggtgg

SEQ ID NO: 45829 - DNA, 33 bp, Homo sapiens
ttataagatatgattcaatgcgacgtcattgcc

SEQ ID NO: 45830 - DNA, 33 bp, Homo sapiens
gagtgcatagtgcagacagtgaaacgccgtcag

SEQ ID NO: 45831 - DNA, 33 bp, Homo sapiens
tggggcacgggagaggcagaagaaatccagtcc

SEQ ID NO: 45832 - DNA, 33 bp, Homo sapiens
gcacagccttatcacacagtattacctggcccc

SEQ ID NO: 45833 - DNA, 33 bp, Homo sapiens
tccaactgaggtttgcagagtttaagctcagca

SEQ ID NO: 45834 - DNA, 33 bp, Homo sapiens
aaaatagggtagcagggccaaatcaaaatgaga

SEQ ID NO: 45835 - DNA, 33 bp, Homo sapiens
atgactttttcttttgcagcacgtattgtacta

SEQ ID NO: 45836 - DNA, 33 bp, Homo sapiens
ctgtttccagaggagacagcttaaaaaccacag

SEQ ID NO: 45837 - DNA, 33 bp, Homo sapiens
agtaagcctggtagcaactagcatgaaacaaaa

SEQ ID NO: 45838 - DNA, 33 bp, Homo sapiens
actcaaggtgactctaatacatatattcctgtt

SEQ ID NO: 45839 - DNA, 33 bp, Homo sapiens
gacccagaatcactaacgtaaggatacctggtc

SEQ ID NO: 45840 - DNA, 33 bp, Homo sapiens
ccggttgagctggaaacccatgtttgccctgca

SEQ ID NO: 45841 - DNA, 33 bp, Homo sapiens
tcagttccttccttgacgggctgatacttgaat

SEQ ID NO: 45842 - DNA, 33 bp, Homo sapiens
aattctcatccataaaaaatgcatacacaatgg

SEQ ID NO: 45843 - DNA, 33 bp, Homo sapiens
aaatggactttaattacaggcgtgccagcactg

SEQ ID NO: 45844 - DNA, 33 bp, Homo sapiens
ctggactgttctttccacagatatcctgaaggc

SEQ ID NO: 45845 - DNA, 51 bp, Homo sapiens
tttctgatggcatagcttttggatcaatcattctctttttttgctctgtct

SEQ ID NO: 45846 - DNA, 33 bp, Homo sapiens
tcaagcactgagccacaggcttgccatacagcc

SEQ ID NO: 45847 - DNA, 33 bp, Homo sapiens
agtcatagtgtgaacacgggccaacaccacttc

SEQ ID NO: 45848 - DNA, 33 bp, Homo sapiens
cagctctacaaaagaacgagttaatgtctttgc

SEQ ID NO: 45849 - DNA, 33 bp, Homo sapiens
aaggtgccacctctaactggctgcagaaaagtg

SEQ ID NO: 45850 - DNA, 33 bp, Homo sapiens
aacacgcaatgaacacactagagccctttgtaa

SEQ ID NO: 45851 - DNA, 33 bp, Homo sapiens
tattcagaaccttgaaagcaccgtgcagaccaa

SEQ ID NO: 45852 - DNA, 33 bp, Homo sapiens
cctgggcagcatagtgacacctgtatctaataa

SEQ ID NO: 45853 - DNA, 33 bp, Homo sapiens
atctgctggtacaaaacctgaattataggaaga

SEQ ID NO: 45854 - DNA, 33 bp, Homo sapiens
ttctaaactgcttctaggtattattaaaccaaa

SEQ ID NO: 45855 - DNA, 33 bp, Homo sapiens
aatacacatccctggacatagttgccaaaaacc

SEQ ID NO: 45856 - DNA, 33 bp, Homo sapiens
actcttcttaggaaacagcctgattaaccagaa

SEQ ID NO: 45857 - DNA, 33 bp, Homo sapiens
tctttggtgcccctaacagcaaagcccagcagg

SEQ ID NO: 45858 - DNA, 33 bp, Homo sapiens
ggttcattattcaggagtattggaagacccaat

SEQ ID NO: 45859 - DNA, 33 bp, Homo sapiens
agacatgactagaaaacaaagatacatatgtcc

SEQ ID NO: 45860 - DNA, 33 bp, Homo sapiens
tagcctttagctgggcgcctttgtgccaaacaa

SEQ ID NO: 45861 - DNA, 33 bp, Homo sapiens
gtttgtaaggctgagcaactggttgttaaagag

SEQ ID NO: 45862 - DNA, 33 bp, Homo sapiens
ttaactgtcagctacacgaaaggagacattcca

SEQ ID NO: 45863 - DNA, 51 bp, Homo sapiens
ttccaagatgggtaggattagaaaacgagccaactggacggggaagtttga

SEQ ID NO: 45864 - DNA, 33 bp, Homo sapiens
cactcccaggtatcaagcaatcccctgagcatt

SEQ ID NO: 45865 - DNA, 51 bp, Homo sapiens
cacaagagacagcacagtgagtacaatgagagtaagaactcggacgtgacc

SEQ ID NO: 45866 - DNA, 33 bp, Homo sapiens
tacttgctattcactacgctgaaaacttttatt

SEQ ID NO: 45867 - DNA, 33 bp, Homo sapiens
ttagaaaatcaagtcaactttgtattactgttc

SEQ ID NO: 45868 - DNA, 33 bp, Homo sapiens
ttccaaataaagcaaaatacaggttctctttgt

SEQ ID NO: 45869 - DNA, 33 bp, Homo sapiens
aaattctgtagatggacattgttatgtttgtac

SEQ ID NO: 45870 - DNA, 33 bp, Homo sapiens
ttctctgcaacaaggacagtaagatgtagatga

SEQ ID NO: 45871 - DNA, 33 bp, Homo sapiens
tggaagtaaagatgaacgacatgcaaagaaata

SEQ ID NO: 45872 - DNA, 33 bp, Homo sapiens
ggtaaacgactagatagtagatatttttggcct

SEQ ID NO: 45873 - DNA, 33 bp, Homo sapiens
tgaatggcacttctaaaaattggctacacaacc

SEQ ID NO: 45874 - DNA, 33 bp, Homo sapiens
aaaacatgtactccgaagtcagatggcctggat

SEQ ID NO: 45875 - DNA, 33 bp, Homo sapiens
ttacagtttgcaaggccatctgagaggtcttcg

SEQ ID NO: 45876 - DNA, 51 bp, Homo sapiens
actgactcaggatacactggatagacacttttctgtgtatgtgatttaaag

SEQ ID NO: 45877 - DNA, 51 bp, Homo sapiens
caaaattgtgggtaatttgagagtcaagacaagtatttattcacaccaatg

SEQ ID NO: 45878 - DNA, 33 bp, Homo sapiens
cctgcattcagtttcaccttttatctgtgttgt

SEQ ID NO: 45879 - DNA, 33 bp, Homo sapiens
acccatgatctacctgaaatggctgtcttcttg

SEQ ID NO: 45880 - DNA, 33 bp, Homo sapiens
aaacacaccagagagcaaagatgaacaccatct

SEQ ID NO: 45881 - DNA, 33 bp, Homo sapiens
aataattccaaaatctgaacagtttacagcaac

SEQ ID NO: 45882 - DNA, 33 bp, Homo sapiens
gcaaaacgagagaacacagtttctgaagttggg

SEQ ID NO: 45883 - DNA, 33 bp, Homo sapiens
gtgattcatcagtccactacatcatttcttgta

SEQ ID NO: 45884 - DNA, 33 bp, Homo sapiens
gaacgcgaaaatcaagaactaaattgctgacta

SEQ ID NO: 45885 - DNA, 33 bp, Homo sapiens
atggcttagttcaagaagagcataatttttaac

SEQ ID NO: 45886 - DNA, 33 bp, Homo sapiens
ctgagtggtccctataagtgattgctctatgcc

SEQ ID NO: 45887 - DNA, 33 bp, Homo sapiens
tgcttccatttttgtacccattggccacttcac

SEQ ID NO: 45888 - DNA, 33 bp, Homo sapiens
cgtttgtctgatgtaaagttcctattttttcca

SEQ ID NO: 45889 - DNA, 33 bp, Homo sapiens
gagctgggtcctgagacaaaggatgcaaatcag

SEQ ID NO: 45890 - DNA, 33 bp, Homo sapiens
ataggatgtcttcctacgattctatatccaatg

SEQ ID NO: 45891 - DNA, 33 bp, Homo sapiens
tttgctgtggacaggacctttatgcgtcgaagg

SEQ ID NO: 45892 - DNA, 33 bp, Homo sapiens
aggttgagggggtttcacatttaccaaagcttt

SEQ ID NO: 45893 - DNA, 33 bp, Homo sapiens
ttttcttggactgttacaacgccatgactcaga

SEQ ID NO: 45894 - DNA, 33 bp, Homo sapiens
aacttcaggactcttacaggatcattggaaaag

SEQ ID NO: 45895 - DNA, 33 bp, Homo sapiens
agtggcagaacacccaatgaaaaatgacctcag

SEQ ID NO: 45896 - DNA, 33 bp, Homo sapiens
cctcctcaaaggtcaaatcctggtcattccttc

SEQ ID NO: 45897 - DNA, 33 bp, Homo sapiens
cttgatgctttttgagaaactggtccattttat

SEQ ID NO: 45898 - DNA, 33 bp, Homo sapiens
aatttaatgcttgttggaactctagaaatctct

SEQ ID NO: 45899 - DNA, 33 bp, Homo sapiens
gaatttgcatttttccaataactcttgaagcca

SEQ ID NO: 45900 - DNA, 33 bp, Homo sapiens
tgtttgaccacttatcagaactttctatataat

SEQ ID NO: 45901 - DNA, 33 bp, Homo sapiens
actgacctagcagaggaatttgaggattaaatg

SEQ ID NO: 45902 - DNA, 33 bp, Homo sapiens
atgtggcagattgcttcaactgactttatcaag

SEQ ID NO: 45903 - DNA, 33 bp, Homo sapiens
tatgagattcaagccaaagaaattatctcagtg

SEQ ID NO: 45904 - DNA, 33 bp, Homo sapiens
tcagcggtaattccacaatgtcactctttcagc

SEQ ID NO: 45905 - DNA, 33 bp, Homo sapiens
gtggcttttgtagagacggagtccctgaccatg

SEQ ID NO: 45906 - DNA, 33 bp, Homo sapiens
cctcaggtctttgatacaatgtcatttaatcag

SEQ ID NO: 45907 - DNA, 51 bp, Homo sapiens
tgacaacagctgagtcaccccgtgcagatataacaagttcgtaagatgtga

SEQ ID NO: 45908 - DNA, 33 bp, Homo sapiens
aaggaccttgccaagccgatcgcagtgtttgga

SEQ ID NO: 45909 - DNA, 33 bp, Homo sapiens
gggatttatgaaatgacgcctttgaagtggaag

SEQ ID NO: 45910 - DNA, 33 bp, Homo sapiens
attggagataaagtccaaggaggtgaactaacc

SEQ ID NO: 45911 - DNA, 51 bp, Homo sapiens
ctctctaaattttggtagtctgataaaagagagcacttgggaatgaattta

SEQ ID NO: 45912 - DNA, 51 bp, Homo sapiens
gttgctctgcaggttattaatgtcccagaataacctaataaggagaacagt

SEQ ID NO: 45913 - DNA, 51 bp, Homo sapiens
caaattataatcattatcaaataccagcttaatccttctaacatttgtaaa

SEQ ID NO: 45914 - DNA, 51 bp, Homo sapiens
ggacagcctgttgatcaatagaatgaaattgagagtccagaaataaagtcc

SEQ ID NO: 45915 - DNA, 33 bp, Homo sapiens
catagcacagaaacaaccgaaatactgagcaaa

SEQ ID NO: 45916 - DNA, 33 bp, Homo sapiens
atgatatagcctttgaactgctagatccagctg

SEQ ID NO: 45917 - DNA, 33 bp, Homo sapiens
aacaatgaataacacactgaaccaaaccacagg

SEQ ID NO: 45918 - DNA, 33 bp, Homo sapiens
tggcatctgaacggagaagaaagaggaggctgg

SEQ ID NO: 45919 - DNA, 33 bp, Homo sapiens
gctgaaggtaaagaagcacctcttagtagctca

SEQ ID NO: 45920 - DNA, 51 bp, Homo sapiens
atcacattgatttaagggaaaaaaaacatattgagtggtgtaaccaagaag

SEQ ID NO: 45921 - DNA, 33 bp, Homo sapiens
atcttggttctaggttcaaaaacaaaacaacct

SEQ ID NO: 45922 - DNA, 33 bp, Homo sapiens
cttaacattcctcctactacgaaaggacaagag

SEQ ID NO: 45923 - DNA, 33 bp, Homo sapiens
actgtggtcatctgaaatactgtgacaaacaac

SEQ ID NO: 45924 - DNA, 33 bp, Homo sapiens
gggcacctcccagaaccctcaggaaacgcctcc

SEQ ID NO: 45925 - DNA, 33 bp, Homo sapiens
tggcacaggcctgcaacagacataggaaacgct

SEQ ID NO: 45926 - DNA, 33 bp, Homo sapiens
taatttcagctttggaacctaagtggctgaagt

SEQ ID NO: 45927 - DNA, 33 bp, Homo sapiens
catgtgtggttggcgcaatctctgggctttgct

SEQ ID NO: 45928 - DNA, 33 bp, Homo sapiens
tcaaattgtaaaaaaaagtagccattacagtct

SEQ ID NO: 45929 - DNA, 33 bp, Homo sapiens
cttggtgtattcttcaaattggcagctggtcta

SEQ ID NO: 45930 - DNA, 33 bp, Homo sapiens
taaattaaatattgcaactgaaatccctgctaa

SEQ ID NO: 45931 - DNA, 33 bp, Homo sapiens
ttctgggctctaaagacacagaggggaataaaa

SEQ ID NO: 45932 - DNA, 33 bp, Homo sapiens
tcactaagcttcttaaggcctgatctcttcatc

SEQ ID NO: 45933 - DNA, 33 bp, Homo sapiens
aggtgctgcttcctacagggctcaaagcacctt

SEQ ID NO: 45934 - DNA, 33 bp, Homo sapiens
tactgggcaagttagaaggacacggtggccctc

SEQ ID NO: 45935 - DNA, 33 bp, Homo sapiens
agagcttctgatccagcaggtttggatggtacc

SEQ ID NO: 45936 - DNA, 33 bp, Homo sapiens
gggtactgaagatatgcaagggtcccaggagct

SEQ ID NO: 45937 - DNA, 33 bp, Homo sapiens
ctctttgagcactacccgaagggcacatccttt

SEQ ID NO: 45938 - DNA, 33 bp, Homo sapiens
tttaatccagtccaaacgttgtggtgtctgccc

SEQ ID NO: 45939 - DNA, 33 bp, Homo sapiens
cagtaaaaactggcaacgctgttcagatatttt

SEQ ID NO: 45940 - DNA, 33 bp, Homo sapiens
agacactcttcaaaaaactgtgtttagtcagac

SEQ ID NO: 45941 - DNA, 33 bp, Homo sapiens
gcaaccaaaaacctaacgcagctaaacataaag

SEQ ID NO: 45942 - DNA, 33 bp, Homo sapiens
gaccttggatctccacagggtaagacttcaggt

SEQ ID NO: 45943 - DNA, 33 bp, Homo sapiens
aggatctgaggattcacgacaaaagggccatct

SEQ ID NO: 45944 - DNA, 33 bp, Homo sapiens
ctatggttatgtaacaactgtgtccgagggatt

SEQ ID NO: 45945 - DNA, 51 bp, Homo sapiens
tttagcccttctcatacaaagggtcactataaaatgagtcaccctcccttc

SEQ ID NO: 45946 - DNA, 33 bp, Homo sapiens
ctagaatgtaaactaccctggcatatgtactac

SEQ ID NO: 45947 - DNA, 51 bp, Homo sapiens
tgaaaattaaaatggaaagaggtatctaaaatctcccactgtatcgtatca

SEQ ID NO: 45948 - DNA, 33 bp, Homo sapiens
tgggcagccttgtgtaccactcactaaattagt

SEQ ID NO: 45949 - DNA, 33 bp, Homo sapiens
ccctagttctccattgaaatcattcccagtaag

SEQ ID NO: 45950 - DNA, 33 bp, Homo sapiens
cccaaatcctgtagagacccttgtcagtggcag

SEQ ID NO: 45951 - DNA, 33 bp, Homo sapiens
aaagtgtctgacagcacgtcaatgcttgttgtt

SEQ ID NO: 45952 - DNA, 33 bp, Homo sapiens
taagctctaggctctacaaaagtgctgtcagca

SEQ ID NO: 45953 - DNA, 33 bp, Homo sapiens
tgatcttaattgccaactgtaattaaatgatta

SEQ ID NO: 45954 - DNA, 33 bp, Homo sapiens
gttggtgaaaattgcccctcttttggtgctctc

SEQ ID NO: 45955 - DNA, 33 bp, Homo sapiens
tgctaatggagagagcacgtctcagaggctgca

SEQ ID NO: 45956 - DNA, 33 bp, Homo sapiens
gaagaaaggaaaagaaccatccagataaatctc

SEQ ID NO: 45957 - DNA, 33 bp, Homo sapiens
gtacaatgaagtcatgcatacctatcatctaga

SEQ ID NO: 45958 - DNA, 33 bp, Homo sapiens
ggttgttgtgacttccaatcaagaggtcctgac

SEQ ID NO: 45959 - DNA, 33 bp, Homo sapiens
tggcatctagtacagaacaatgatggtctatct

SEQ ID NO: 45960 - DNA, 33 bp, Homo sapiens
tgcagctggttcctgacaggccaggcagcactt

SEQ ID NO: 45961 - DNA, 33 bp, Homo sapiens
cagcctgtgactataccgagtgctgtacagcag

SEQ ID NO: 45962 - DNA, 33 bp, Homo sapiens
catggcgtgtgttctacattcacaagaaggaaa

SEQ ID NO: 45963 - DNA, 33 bp, Homo sapiens
actgagtctgggccacccactggtgagctgttc

SEQ ID NO: 45964 - DNA, 33 bp, Homo sapiens
accagatgttggctgaagcattgatttatgggc

SEQ ID NO: 45965 - DNA, 33 bp, Homo sapiens
cttacagtatacctggacatttcctgtgtctcc

SEQ ID NO: 45966 - DNA, 51 bp, Homo sapiens
agagttcctcttgctccatatttttgccagtatgtagtggtgtccatgttc

SEQ ID NO: 45967 - DNA, 33 bp, Homo sapiens
gagtcattttaaattggattagtgagggcaact

SEQ ID NO: 45968 - DNA, 33 bp, Homo sapiens
ggaagtttaaaggctaggtgttcccaagaggac

SEQ ID NO: 45969 - DNA, 33 bp, Homo sapiens
caatggtgagaacggacgggattcttttcagaa

SEQ ID NO: 45970 - DNA, 33 bp, Homo sapiens
agtttcttggagactaacccagacagttgcaac

SEQ ID NO: 45971 - DNA, 33 bp, Homo sapiens
atcagttgtttgagtaccatcttcaaggctttc

SEQ ID NO: 45972 - DNA, 33 bp, Homo sapiens
acagtcactactccacactgtcttatgcccagg

SEQ ID NO: 45973 - DNA, 33 bp, Homo sapiens
gtgagaggacacttgacgatggagaggtcggag

SEQ ID NO: 45974 - DNA, 33 bp, Homo sapiens
gggtgtcattggtagaagaatcagaggaatgga

SEQ ID NO: 45975 - DNA, 33 bp, Homo sapiens
aagacctaacagaaacccatgcccaggtgcagc

SEQ ID NO: 45976 - DNA, 33 bp, Homo sapiens
gcgaaacagaaactgccaggaattatccactct

SEQ ID NO: 45977 - DNA, 33 bp, Homo sapiens
cagaagggcggtaacaatggcagcaaccacgca

SEQ ID NO: 45978 - DNA, 33 bp, Homo sapiens
taatgcttccagttacacttaaaaatattttct

SEQ ID NO: 45979 - DNA, 33 bp, Homo sapiens
gcgacttagttaacaaccctccaattccattat

SEQ ID NO: 45980 - DNA, 33 bp, Homo sapiens
catgtcagaaagaaaaagcagtgtcagcacatg

SEQ ID NO: 45981 - DNA, 33 bp, Homo sapiens
accctggtttgcagataaaactgagtgatcaca

SEQ ID NO: 45982 - DNA, 33 bp, Homo sapiens
taggcatcctgggtcaatccgtctggcagccct

SEQ ID NO: 45983 - DNA, 33 bp, Homo sapiens
ggaactggtccaacaaccagaaaatttgacgtt

SEQ ID NO: 45984 - DNA, 33 bp, Homo sapiens
ttgccgtgctgaatacaagaggcaactgtaacg

SEQ ID NO: 45985 - DNA, 33 bp, Homo sapiens
tgtctgtgcattcctacggtaaggcacatgatc

SEQ ID NO: 45986 - DNA, 33 bp, Homo sapiens
agctgtcatctcctgtcacaccaattgccttct

SEQ ID NO: 45987 - DNA, 33 bp, Homo sapiens
tggattctccagggacaaggacgtggtcacact

SEQ ID NO: 45988 - DNA, 33 bp, Homo sapiens
gcgccgtgtagggctcaatgtggcttcaagtaa

SEQ ID NO: 45989 - DNA, 33 bp, Homo sapiens
tgcccccacccttgacagctgcaggagagccct

SEQ ID NO: 45990 - DNA, 33 bp, Homo sapiens
tacgcctgtatgcggacatgtatgtgagcacgt

SEQ ID NO: 45991 - DNA, 33 bp, Homo sapiens
ggctatgagtgcctccccttagtgagtgcaggg

SEQ ID NO: 45992 - DNA, 33 bp, Homo sapiens
gattaactcactagaaactcaataacccaagag

SEQ ID NO: 45993 - DNA, 33 bp, Homo sapiens
tatcttttcattaccaacctcagtatttctagt

SEQ ID NO: 45994 - DNA, 33 bp, Homo sapiens
tgtcttctgcagttcactcagggacacatcgag

SEQ ID NO: 45995 - DNA, 33 bp, Homo sapiens
taggagccctctataaacctgctcctgaaaaat

SEQ ID NO: 45996 - DNA, 33 bp, Homo sapiens
cacgcatgtggtccgaaaggtggcagctggccg

SEQ ID NO: 45997 - DNA, 33 bp, Homo sapiens
acatttaaatgcaaagccaaataaaatgcagcc

SEQ ID NO: 45998 - DNA, 33 bp, Homo sapiens
ttaaggagatgctaacaattaaggagaagctaa

SEQ ID NO: 45999 - DNA, 51 bp, Homo sapiens
taaatagttaattcttaaaagttgaacaaacatcgatcccttttgcctttc

SEQ ID NO: 46000 - DNA, 33 bp, Homo sapiens
agcaagcatcagtaaacgagagtgagcctctcc

SEQ ID NO: 46001 - DNA, 33 bp, Homo sapiens
ctatcaggagtatgttcaaaagaaggagtaggg

SEQ ID NO: 46002 - DNA, 33 bp, Homo sapiens
taagggagtagagaacaatgcaacaaaatggtt

SEQ ID NO: 46003 - DNA, 33 bp, Homo sapiens
accccactcttgctacagctaccactccaaatc

SEQ ID NO: 46004 - DNA, 33 bp, Homo sapiens
acaaatcataaaattcaaagcatagatagaagg

SEQ ID NO: 46005 - DNA, 33 bp, Homo sapiens
tgccatcaggttgaagaatacaattagatagta

SEQ ID NO: 46006 - DNA, 33 bp, Homo sapiens
actttctagtagcaaagtatttctggacaacct

SEQ ID NO: 46007 - DNA, 33 bp, Homo sapiens
aataatttgcaatcaacgcttcttatctaaaag

SEQ ID NO: 46008 - DNA, 33 bp, Homo sapiens
gctcatttttatggaacggaacaaatgtgtttg

SEQ ID NO: 46009 - DNA, 51 bp, Homo sapiens
tctcaatatggttgtactgtataaaaatggaatcaaatgaaagaagccaga

SEQ ID NO: 46010 - DNA, 51 bp, Homo sapiens
aagacataagcagatcaagacagacaattaggatatacgcagcaagactac

SEQ ID NO: 46011 - DNA, 51 bp, Homo sapiens
aacaaaaacaaaaatcccgaagaaacaaaactagtgtcttaattatatgct

SEQ ID NO: 46012 - DNA, 33 bp, Homo sapiens
aacaataggatagaggaatcaatacgcttattg

SEQ ID NO: 46013 - DNA, 33 bp, Homo sapiens
tttttcactgttttgaaaaattcttccatatta

SEQ ID NO: 46014 - DNA, 33 bp, Homo sapiens
atagctgcatacttcaaaacacaaagatattat

SEQ ID NO: 46015 - DNA, 33 bp, Homo sapiens
ttgatggcgaatgttaaaagcagttttactagt

SEQ ID NO: 46016 - DNA, 33 bp, Homo sapiens
acaacatagagtaatgcagcagtttagaagtta

SEQ ID NO: 46017 - DNA, 33 bp, Homo sapiens
caattttgtgcttagaatagacctatgcattta

SEQ ID NO: 46018 - DNA, 33 bp, Homo sapiens
gagaaatgatatatgacggcgaacagtagttta

SEQ ID NO: 46019 - DNA, 51 bp, Homo sapiens
gatagctttctcagtcatgactatcagtaatttacaccccccttaagttct

SEQ ID NO: 46020 - DNA, 51 bp, Homo sapiens
tcaatggcacagaatctaacatccccgagctaaggttcagcaggagctcat

SEQ ID NO: 46021 - DNA, 51 bp, Homo sapiens
tttgaggctagtaacacaatttagaacagaataggttttcatatatcaaaa

SEQ ID NO: 46022 - DNA, 33 bp, Homo sapiens
ctttttcacttgacaaacagatgtgaagttaac

SEQ ID NO: 46023 - DNA, 33 bp, Homo sapiens
tacaaatactttttaacgccacctggccaattc

SEQ ID NO: 46024 - DNA, 33 bp, Homo sapiens
agtttagcttcaagaacggcagaactacacaca

SEQ ID NO: 46025 - DNA, 33 bp, Homo sapiens
ttgttcgagggtattaagaaatgcatctaaaaa

SEQ ID NO: 46026 - DNA, 51 bp, Homo sapiens
gaccgtaattgaaactataaagtcacacactcttggattgacccttcatca

SEQ ID NO: 46027 - DNA, 33 bp, Homo sapiens
ggttccttaaagaaagcctattcagttgacaat

SEQ ID NO: 46028 - DNA, 33 bp, Homo sapiens
cattggtgctagccaaacatcccactctatcac

SEQ ID NO: 46029 - DNA, 33 bp, Homo sapiens
tgaggtcatctctacagctttaataccctaagc

SEQ ID NO: 46030 - DNA, 33 bp, Homo sapiens
gggaagcaaactctcaatgaaaatgtaccaggg

SEQ ID NO: 46031 - DNA, 33 bp, Homo sapiens
aaaaatacaaaagccaatctgtcaaaacgtatt

SEQ ID NO: 46032 - DNA, 33 bp, Homo sapiens
aaatatgatgatcaaaagtgcatttatgccttg

SEQ ID NO: 46033 - DNA, 33 bp, Homo sapiens
agtgccttataggtaaagtggcttaattcacag

SEQ ID NO: 46034 - DNA, 33 bp, Homo sapiens
tagtcactacgttccacatctaatccatgtgat

SEQ ID NO: 46035 - DNA, 33 bp, Homo sapiens
tgttcacaggtagcaaagtactcttagcaggcc

SEQ ID NO: 46036 - DNA, 33 bp, Homo sapiens
acatcaagattgctctaacctgaggacaggatt

SEQ ID NO: 46037 - DNA, 33 bp, Homo sapiens
agacatgtctggaactaagaagaaaatgagatt

SEQ ID NO: 46038 - DNA, 51 bp, Homo sapiens
ctttttcatttagttctacaatctaacttaatttcatcaccatatatatat

SEQ ID NO: 46039 - DNA, 51 bp, Homo sapiens
aaagagtttttcaatttctttaaaacttatgcctaccttatgacccagcaa

SEQ ID NO: 46040 - DNA, 33 bp, Homo sapiens
tgaaatatgtgaggtcaataaacacatataaag

SEQ ID NO: 46041 - DNA, 33 bp, Homo sapiens
catgcgcaggttgagcacaattttatacttatt

SEQ ID NO: 46042 - DNA, 33 bp, Homo sapiens
aaaatctgtagcaggaacaagataaagctaatt

SEQ ID NO: 46043 - DNA, 33 bp, Homo sapiens
tcgtttccctcctttaactgctctttgctctga

SEQ ID NO: 46044 - DNA, 33 bp, Homo sapiens
agtctacatttcaaccgggtgttaactctggtc

SEQ ID NO: 46045 - DNA, 33 bp, Homo sapiens
ggctgtagttttctgggcaagtatctccaatct

SEQ ID NO: 46046 - DNA, 33 bp, Homo sapiens
agcatttttgagtgcacaggtaggcaggaaaga

SEQ ID NO: 46047 - DNA, 33 bp, Homo sapiens
atgtcagcagattacacaattatggctcccagt

SEQ ID NO: 46048 - DNA, 33 bp, Homo sapiens
aacaaatcattcttgaaccttagatagtgggga

SEQ ID NO: 46049 - DNA, 33 bp, Homo sapiens
ttttttattctgttgacctaatgcttcgtattt

SEQ ID NO: 46050 - DNA, 51 bp, Homo sapiens
tagccatatttactcaacaagatacatatttactcaacaaggtattccaag

SEQ ID NO: 46051 - DNA, 33 bp, Homo sapiens
tattctgtgaagacacgcagtagaatggttaga

SEQ ID NO: 46052 - DNA, 33 bp, Homo sapiens
ctcaataaacaggatgaaccaactttattaagg

SEQ ID NO: 46053 - DNA, 51 bp, Homo sapiens
agaatgtccttcattgctttaattccattcatcatacaaccccaggttgta

SEQ ID NO: 46054 - DNA, 51 bp, Homo sapiens
accagtttgcttgttttatccacgactactttcagacaccattatgtgtaa

SEQ ID NO: 46055 - DNA, 33 bp, Homo sapiens
ctgtaaactgttcttgcaaatatatctgatatg

SEQ ID NO: 46056 - DNA, 33 bp, Homo sapiens
caatgtaggctgcaaaacattaaagggtcaagc

SEQ ID NO: 46057 - DNA, 33 bp, Homo sapiens
tccccactgcggtctacgggagctatgagaaga

SEQ ID NO: 46058 - DNA, 33 bp, Homo sapiens
ttaaaaatttgatgaaactaggaagctgtttcc

SEQ ID NO: 46059 - DNA, 33 bp, Homo sapiens
ataacacactagaaaaacattaggagatatacc

SEQ ID NO: 46060 - DNA, 33 bp, Homo sapiens
gagacacacttccaacactatttgtagaattat

SEQ ID NO: 46061 - DNA, 33 bp, Homo sapiens
agttgcaggaggttaacgagataacaatacatg

SEQ ID NO: 46062 - DNA, 33 bp, Homo sapiens
agtattgtgaggttataaaaggaataacaacca

SEQ ID NO: 46063 - DNA, 33 bp, Homo sapiens
aggctgtaactgtaaacgaattaaggcagaaac

SEQ ID NO: 46064 - DNA, 51 bp, Homo sapiens
gtgaatttcttacttatatatgaggacaattttatcgagcatttttcatgg

SEQ ID NO: 46065 - DNA, 51 bp, Homo sapiens
taaagttaattttattattacaccccatgagtaccaccaattaaatattgc

SEQ ID NO: 46066 - DNA, 33 bp, Homo sapiens
acttctttacctataacatgaagaacacagtta

SEQ ID NO: 46067 - DNA, 33 bp, Homo sapiens
gcatggtgtctgcaacaggaaggatttcattgc

SEQ ID NO: 46068 - DNA, 33 bp, Homo sapiens
aaaaaaatgaagtgacaactgctttcaaaagat

SEQ ID NO: 46069 - DNA, 33 bp, Homo sapiens
gaaggtggaagaaaaacgtccttactagtatgc

SEQ ID NO: 46070 - DNA, 33 bp, Homo sapiens
aaagggctactatgccgagattgattatctcct

SEQ ID NO: 46071 - DNA, 33 bp, Homo sapiens
agagtaaatgaggcaactgtttgtcaaaatagt

SEQ ID NO: 46072 - DNA, 51 bp, Homo sapiens
atgaaaaagaaaagtattacataacaataaaggtttcaactcaacaagaag

SEQ ID NO: 46073 - DNA, 33 bp, Homo sapiens
tcagtgactgagagtacatcaagtttttttctg

SEQ ID NO: 46074 - DNA, 33 bp, Homo sapiens
agcaaggtactatcccagaaagctgagagcagc

SEQ ID NO: 46075 - DNA, 33 bp, Homo sapiens
tttgactacattacacggctatcaaatttcatg

SEQ ID NO: 46076 - DNA, 33 bp, Homo sapiens
tttaactgctgaagaacaagatcaccacaatca

SEQ ID NO: 46077 - DNA, 33 bp, Homo sapiens
cttaggatttgtctgccatagtgatattctaag

SEQ ID NO: 46078 - DNA, 33 bp, Homo sapiens
gaagagtcaggggttacataagtaccagataca

SEQ ID NO: 46079 - DNA, 51 bp, Homo sapiens
acctagggagatcaggcatttccagctgactcacagtgggctatcttttaa

SEQ ID NO: 46080 - DNA, 33 bp, Homo sapiens
agaaatctgttaaccacaaaaaaatcaggataa

SEQ ID NO: 46081 - DNA, 33 bp, Homo sapiens
atatgtctgcaatatactaaggactgatataaa

SEQ ID NO: 46082 - DNA, 33 bp, Homo sapiens
atgtgcatattggcagccattgattacagtggt

SEQ ID NO: 46083 - DNA, 33 bp, Homo sapiens
caaaatacaatcgaaaactttatcagtaaaaca

SEQ ID NO: 46084 - DNA, 51 bp, Homo sapiens
atgtgtaataaaactatcacaaatacgacagcaaaagaatcaaatttcaaa

SEQ ID NO: 46085 - DNA, 33 bp, Homo sapiens
ttgtaaatgaatgttacgttttatgcatcaaac

SEQ ID NO: 46086 - DNA, 33 bp, Homo sapiens
gcatagtaacataacactactgatcggagttct

SEQ ID NO: 46087 - DNA, 51 bp, Homo sapiens
gcttttgacttaattcttccatgtaacatctataatattatatcaagtatc

SEQ ID NO: 46088 - DNA, 33 bp, Homo sapiens
cttagttactagatgaacttaggtaactcttaa

SEQ ID NO: 46089 - DNA, 33 bp, Homo sapiens
agaggagattcaccggacccttgaagaatgtca

SEQ ID NO: 46090 - DNA, 33 bp, Homo sapiens
ctagctatgttttcccacttcctttgatctatt

SEQ ID NO: 46091 - DNA, 33 bp, Homo sapiens
ccctggggaggatagaaattagctcagatggaa

SEQ ID NO: 46092 - DNA, 33 bp, Homo sapiens
atctgtacaattggagaaaactaccaatacatg

SEQ ID NO: 46093 - DNA, 33 bp, Homo sapiens
aatttttcattaggcacaagaatatggttcact

SEQ ID NO: 46094 - DNA, 33 bp, Homo sapiens
ttgacttggttggcaaagttatgaagctacatt

SEQ ID NO: 46095 - DNA, 33 bp, Homo sapiens
tactgattcttcataaagcatttcatccatccc

SEQ ID NO: 46096 - DNA, 33 bp, Homo sapiens
actgagttgccataatcagaacataatatttga

SEQ ID NO: 46097 - DNA, 51 bp, Homo sapiens
ttaagaacaagcctgactggataaacagctaactcatttagaaaaagactg

SEQ ID NO: 46098 - DNA, 33 bp, Homo sapiens
tataaacaagctcataaatttgtggaggaatcc

SEQ ID NO: 46099 - DNA, 33 bp, Homo sapiens
atctaactcagaggataagctcttaatgctata

SEQ ID NO: 46100 - DNA, 51 bp, Homo sapiens
gttaaagacactggttgttaccatcaattaaaaatattattttattaagat

SEQ ID NO: 46101 - DNA, 51 bp, Homo sapiens
gccttttgcctgtatcacactgtctcgactaatgtacctttatgtaattta

SEQ ID NO: 46102 - DNA, 51 bp, Homo sapiens
agcagacatcctctgatactgcaaagaactcataaaatgcacctaatcatc

SEQ ID NO: 46103 - DNA, 51 bp, Homo sapiens
cttagttaaatagattagtttagaaaataagtttatgtgtcttaaaagcac

SEQ ID NO: 46104 - DNA, 51 bp, Homo sapiens
ttcctagcctgaaatcttgaatcaactgttaaatctcgtatatttttgcat

SEQ ID NO: 46105 - DNA, 51 bp, Homo sapiens
tataaagagattacctgaactgaagaagattgtgttatgtaggtatgaaga

SEQ ID NO: 46106 - DNA, 33 bp, Homo sapiens
aaagaagcaactacaaaaatggcatgaaagccc

SEQ ID NO: 46107 - DNA, 33 bp, Homo sapiens
tcagctgtaggcacaacatgatgtctccagaaa

SEQ ID NO: 46108 - DNA, 51 bp, Homo sapiens
gttgagcctaattgaagtttccctacatacagtaagttcagagaaacactc

SEQ ID NO: 46109 - DNA, 33 bp, Homo sapiens
caaaactcaatgccaactggttgaacgcttagc

SEQ ID NO: 46110 - DNA, 33 bp, Homo sapiens
aggaggaacaggcagagaaaaatatgtatagag

SEQ ID NO: 46111 - DNA, 33 bp, Homo sapiens
atagagaaagtagggcacattgacaaattttgt

SEQ ID NO: 46112 - DNA, 33 bp, Homo sapiens
gttttgttacaaaagacagtaatgctgtaatgg

SEQ ID NO: 46113 - DNA, 51 bp, Homo sapiens
gtttcacaaagggatacagattccacggtgataaagaaacactgggttgag

SEQ ID NO: 46114 - DNA, 33 bp, Homo sapiens
acccagttgacagagacacttgagtctggagct

SEQ ID NO: 46115 - DNA, 33 bp, Homo sapiens
aaccttcattaatcagaaaccctacttcagtaa

SEQ ID NO: 46116 - DNA, 33 bp, Homo sapiens
gaatctggaaaccctacgcctacagttgctaca

SEQ ID NO: 46117 - DNA, 33 bp, Homo sapiens
tagaagcagtgatagaatctataaaatgtagaa

SEQ ID NO: 46118 - DNA, 33 bp, Homo sapiens
atatgtatgtaaaggaaaatcttcagcattctt

SEQ ID NO: 46119 - DNA, 33 bp, Homo sapiens
gaagagctgttgtataagcaagtagaatgtgtt

SEQ ID NO: 46120 - DNA, 51 bp, Homo sapiens
gagataagaatattgacaataggtgcaaaagagtaattttagtgatggccc

SEQ ID NO: 46121 - DNA, 33 bp, Homo sapiens
atctgacatctactttaaaaggttcactctggc

SEQ ID NO: 46122 - DNA, 33 bp, Homo sapiens
taaatactattccaaaaacaatgcccgcaattg

SEQ ID NO: 46123 - DNA, 33 bp, Homo sapiens
tagctttttcatactcaaacatagtaaaatagc

SEQ ID NO: 46124 - DNA, 33 bp, Homo sapiens
ttgaactttctggatcgattctctaactctttt

SEQ ID NO: 46125 - DNA, 33 bp, Homo sapiens
caactttatttgtcaaaccaaaatgccctacaa

SEQ ID NO: 46126 - DNA, 33 bp, Homo sapiens
cacaaaagactcagaactgaaaactggaattga

SEQ ID NO: 46127 - DNA, 33 bp, Homo sapiens
gctggccttggagttacatggcttgcccacgag

SEQ ID NO: 46128 - DNA, 33 bp, Homo sapiens
tgtttcacttgtttcactcgtttcactatttag

SEQ ID NO: 46129 - DNA, 33 bp, Homo sapiens
attgaccacaccctcaccccaagtcaaatcact

SEQ ID NO: 46130 - DNA, 33 bp, Homo sapiens
ttaatgtgatgtaaaaaacctattatcataggc

SEQ ID NO: 46131 - DNA, 33 bp, Homo sapiens
aagagggccatctaccactcctgcagtctcatg

SEQ ID NO: 46132 - DNA, 33 bp, Homo sapiens
tttctgcagggaggcaatcataaaacaggatga

SEQ ID NO: 46133 - DNA, 51 bp, Homo sapiens
tttattcacttattatagataataacttcctagtctacatttcattacagc

SEQ ID NO: 46134 - DNA, 33 bp, Homo sapiens
ttttttcttccagttacggcaattccttctgcc

SEQ ID NO: 46135 - DNA, 33 bp, Homo sapiens
attgtatctcctatttaaaacttctcttccata

SEQ ID NO: 46136 - DNA, 33 bp, Homo sapiens
attgtgatgtggtgtacgtcttcttacttctct

SEQ ID NO: 46137 - DNA, 33 bp, Homo sapiens
agtctagccaagttaaaacattacaaagtcatc

SEQ ID NO: 46138 - DNA, 33 bp, Homo sapiens
ggatgcttggggagtacaaaaatgagcaaagaa

SEQ ID NO: 46139 - DNA, 33 bp, Homo sapiens
gttggatgatttatcaaccacttgtcaagaaca

SEQ ID NO: 46140 - DNA, 33 bp, Homo sapiens
taagaagttttaggacagatggtaaaaatgaga

SEQ ID NO: 46141 - DNA, 33 bp, Homo sapiens
catgacaacatggaaacagaacaacctgctcct

SEQ ID NO: 46142 - DNA, 33 bp, Homo sapiens
cagcatttctaatttcaccctagtccagtgatc

SEQ ID NO: 46143 - DNA, 33 bp, Homo sapiens
gtacatggagaaattaaggaccgcattttaaag

SEQ ID NO: 46144 - DNA, 33 bp, Homo sapiens
ctgggttctgctctcaaatagctcggaggagga

SEQ ID NO: 46145 - DNA, 33 bp, Homo sapiens
aagcatgaataaaagcaatgtctaacaaatgtc

SEQ ID NO: 46146 - DNA, 33 bp, Homo sapiens
cattgtagaaacaagcactctcttctgactcgt

SEQ ID NO: 46147 - DNA, 33 bp, Homo sapiens
gatgcacttccaacagaaaaagaatattgcatt

SEQ ID NO: 46148 - DNA, 33 bp, Homo sapiens
tctttcttttgttcctcagagctaccctgtgag

SEQ ID NO: 46149 - DNA, 33 bp, Homo sapiens
agtggatgtacctggacactgaactagcacaaa

SEQ ID NO: 46150 - DNA, 33 bp, Homo sapiens
tacttagcctgaatacacatgtaaatatggaca

SEQ ID NO: 46151 - DNA, 33 bp, Homo sapiens
gactatgtactgaagcaaggcagggatgtaaag

SEQ ID NO: 46152 - DNA, 33 bp, Homo sapiens
agtgtcaaatgcactgaagatgtcctgtagaat

SEQ ID NO: 46153 - DNA, 33 bp, Homo sapiens
tgtgtagagtcacagacaattcaattttttcaa

SEQ ID NO: 46154 - DNA, 33 bp, Homo sapiens
cccatgggcttcagtaataaaacctatgtttca

SEQ ID NO: 46155 - DNA, 33 bp, Homo sapiens
tgccgagctcgcttgaacagcacatactgagcc

SEQ ID NO: 46156 - DNA, 33 bp, Homo sapiens
gcagagttcatgttataagagaaagctcaaagc

SEQ ID NO: 46157 - DNA, 33 bp, Homo sapiens
aaagatcttcagtccacgtgtagatttaataaa

SEQ ID NO: 46158 - DNA, 33 bp, Homo sapiens
aggacaggaaagttcaatcctatattttgaagg

SEQ ID NO: 46159 - DNA, 33 bp, Homo sapiens
ttagtattttcatcaggagaagttattggaaat

SEQ ID NO: 46160 - DNA, 33 bp, Homo sapiens
atcattctgcaggaaagttatttggaggacata

SEQ ID NO: 46161 - DNA, 33 bp, Homo sapiens
tggttcagggtcagccaaagagcattctttccc

SEQ ID NO: 46162 - DNA, 33 bp, Homo sapiens
tacatactattataaacgtggttctgaggccac

SEQ ID NO: 46163 - DNA, 33 bp, Homo sapiens
tgtcaaaaaccagtgacctctagatatcaattg

SEQ ID NO: 46164 - DNA, 33 bp, Homo sapiens
tctcatacttaactgcacttcaagtccgcacaa

SEQ ID NO: 46165 - DNA, 33 bp, Homo sapiens
aactcttagtaggatacctatcaggcattggaa

SEQ ID NO: 46166 - DNA, 33 bp, Homo sapiens
attaaaaatgggttaacgctcatggcttcttta

SEQ ID NO: 46167 - DNA, 33 bp, Homo sapiens
ttcacctagagacagacggtgctagaccactgg

SEQ ID NO: 46168 - DNA, 33 bp, Homo sapiens
gacagtgtgattatcacctacctttcctgatga

SEQ ID NO: 46169 - DNA, 33 bp, Homo sapiens
ttatttaaccatactacaaaatcaaacctagga

SEQ ID NO: 46170 - DNA, 51 bp, Homo sapiens
gtctcaagtggaacagctagcacagaagaaagaacttttctcaacacattt

SEQ ID NO: 46171 - DNA, 51 bp, Homo sapiens
cacctccacttattcattttactggaacaaatttatgattgataattctct

SEQ ID NO: 46172 - DNA, 33 bp, Homo sapiens
ccacgaaaggattacactagctctgcagcaatg

SEQ ID NO: 46173 - DNA, 51 bp, Homo sapiens
caatttctggtaactataataaaggaacatcagttaattcttctcacttct

SEQ ID NO: 46174 - DNA, 33 bp, Homo sapiens
tggagttttgagactagactagcatactcttaa

SEQ ID NO: 46175 - DNA, 33 bp, Homo sapiens
tcctatttacactccaatctgtgaaggatcctt

SEQ ID NO: 46176 - DNA, 33 bp, Homo sapiens
tctcactttcttagccaatgggccctctactca

SEQ ID NO: 46177 - DNA, 51 bp, Homo sapiens
aaggaatgaattttttgtgtgataaagtcaaacagcacgtggaattagcca

SEQ ID NO: 46178 - DNA, 33 bp, Homo sapiens
tggctggaactgtaaacctgatgtaacgtctgt

SEQ ID NO: 46179 - DNA, 33 bp, Homo sapiens
tgtggaaaatgaatgcaacttaagatgccattt

SEQ ID NO: 46180 - DNA, 33 bp, Homo sapiens
gatttcaggtgacggactccgaaagtaaaaaga

SEQ ID NO: 46181 - DNA, 33 bp, Homo sapiens
tttgttaagtggaagcaactcatcataaaggtc

SEQ ID NO: 46182 - DNA, 51 bp, Homo sapiens
ttattcaagactgttgtaatatagaaatccaattagactattttcttaatt

SEQ ID NO: 46183 - DNA, 51 bp, Homo sapiens
tcaatgaggaaaaaaaaaccattcgccattatatcagattgttaataacat

SEQ ID NO: 46184 - DNA, 33 bp, Homo sapiens
atgtgtaatgaggactaaagcattgatgaagaa

SEQ ID NO: 46185 - DNA, 33 bp, Homo sapiens
gataacacacagttcaactccagggtcactgcc

SEQ ID NO: 46186 - DNA, 33 bp, Homo sapiens
ctttgtgatctctaacagaatacatgattgcac

SEQ ID NO: 46187 - DNA, 33 bp, Homo sapiens
acgttgcacggcgaccgcttgatccattctgtg

SEQ ID NO: 46188 - DNA, 51 bp, Homo sapiens
gagactttaaccaacttgatggcaaacctaacaaaagatgtctaccaatta

SEQ ID NO: 46189 - DNA, 33 bp, Homo sapiens
ttttccgaaagactgactacctccaatgacact

SEQ ID NO: 46190 - DNA, 33 bp, Homo sapiens
ccctgtcttcttggagacgtacaggaagataca

SEQ ID NO: 46191 - DNA, 33 bp, Homo sapiens
ccagacactattctgagaactttgtttgaattt

SEQ ID NO: 46192 - DNA, 33 bp, Homo sapiens
tacaactcttaggaacactcttttgaatgtatg

SEQ ID NO: 46193 - DNA, 33 bp, Homo sapiens
aatataagcacctctcaatgttagctgttttgt

SEQ ID NO: 46194 - DNA, 33 bp, Homo sapiens
catttgtgcaatgtccgatttgttacaggttgg

SEQ ID NO: 46195 - DNA, 33 bp, Homo sapiens
cagtataagttcttggccatctctactactgcc

SEQ ID NO: 46196 - DNA, 33 bp, Homo sapiens
agggcgggcttcgaaccgagagcttgaattcca

SEQ ID NO: 46197 - DNA, 33 bp, Homo sapiens
tcctatgctcattgtaacaatcactgataaatg

SEQ ID NO: 46198 - DNA, 33 bp, Homo sapiens
aaaacagattggagtaagcatcacagacaaacc

SEQ ID NO: 46199 - DNA, 33 bp, Homo sapiens
gcaaaatgaatcagacacaggttcctactccaa

SEQ ID NO: 46200 - DNA, 33 bp, Homo sapiens
acagatggtttgtggacaaatgatcactaggaa

SEQ ID NO: 46201 - DNA, 33 bp, Homo sapiens
ccctaaaatatgcctccctaaaatacataaaac

SEQ ID NO: 46202 - DNA, 33 bp, Homo sapiens
gtgtgcttcatcgctacggaagcttagaaaatt

SEQ ID NO: 46203 - DNA, 33 bp, Homo sapiens
tggggaccgagactcaatctgtgggatatgatg

SEQ ID NO: 46204 - DNA, 33 bp, Homo sapiens
ccgtgcatacagcagacacttggtttccttttg

SEQ ID NO: 46205 - DNA, 51 bp, Homo sapiens
cagaaatgaatttaagtaattacgccgaaaatttccttaaacatgatttaa

SEQ ID NO: 46206 - DNA, 33 bp, Homo sapiens
aataatacagtaatcaaattcttccaggaagta

SEQ ID NO: 46207 - DNA, 33 bp, Homo sapiens
caagattggaatgtgaagtttaaataggacatt

SEQ ID NO: 46208 - DNA, 33 bp, Homo sapiens
cctctcgcctcctccccactgctatagcctctc

SEQ ID NO: 46209 - DNA, 33 bp, Homo sapiens
taatcggaatttaaaccgacacattcttgtcca

SEQ ID NO: 46210 - DNA, 33 bp, Homo sapiens
acatcataaaacactaagatttttctgcttcag

SEQ ID NO: 46211 - DNA, 33 bp, Homo sapiens
tgagctgctgtgggtcaaaccatctctcaggtg

SEQ ID NO: 46212 - DNA, 33 bp, Homo sapiens
ctcagtttacagttggctaaatatggcatttgt

SEQ ID NO: 46213 - DNA, 33 bp, Homo sapiens
atatattttttactcaccgagggtctccctgca

SEQ ID NO: 46214 - DNA, 33 bp, Homo sapiens
agcagttgcactaagaagtcagaagaacctgct

SEQ ID NO: 46215 - DNA, 33 bp, Homo sapiens
ttaaaaatatttctggcagcactgagtccacag

SEQ ID NO: 46216 - DNA, 33 bp, Homo sapiens
ctctttagtctcttcccgctccagtaggattgt

SEQ ID NO: 46217 - DNA, 33 bp, Homo sapiens
tttggggcatgtctaggcagttgcaatgtagtc

SEQ ID NO: 46218 - DNA, 33 bp, Homo sapiens
tttcccatctagaatcaaagtagaaaaccactc

SEQ ID NO: 46219 - DNA, 33 bp, Homo sapiens
tcatcaaggcttttgacacttattgccaaattt

SEQ ID NO: 46220 - DNA, 33 bp, Homo sapiens
aaaacaaacctaatacggcaccatttccgtcca

SEQ ID NO: 46221 - DNA, 33 bp, Homo sapiens
tgcagccgtggctacaatagcaagttctcaggg

SEQ ID NO: 46222 - DNA, 33 bp, Homo sapiens
tgtggctttttatatacgctgctcgcctgagat

SEQ ID NO: 46223 - DNA, 33 bp, Homo sapiens
agaacatctgctcaatgaccgtgaggaaggaag

SEQ ID NO: 46224 - DNA, 33 bp, Homo sapiens
tggtacaaacgaagaaggtgtttgggagactcc

SEQ ID NO: 46225 - DNA, 33 bp, Homo sapiens
gaaatttctgttgcaccacttagagtccagagt

SEQ ID NO: 46226 - DNA, 33 bp, Homo sapiens
atctcatgttaaccaacggtgcctagtggaacc

SEQ ID NO: 46227 - DNA, 33 bp, Homo sapiens
gggcataaagcacatacgatgaaaattctcctt

SEQ ID NO: 46228 - DNA, 33 bp, Homo sapiens
taatgagatacaatgacgccagtggtggaagag

SEQ ID NO: 46229 - DNA, 33 bp, Homo sapiens
actatcataatgaaataaaactcacaacaaagg

SEQ ID NO: 46230 - DNA, 33 bp, Homo sapiens
aggctaaactccctcaggtgccaaacagatatt

SEQ ID NO: 46231 - DNA, 33 bp, Homo sapiens
atcttcagaagctacactggtgcctgaacagat

SEQ ID NO: 46232 - DNA, 51 bp, Homo sapiens
gagcacattgtcactttttccagcaacttgggtatattacatatcttatta

SEQ ID NO: 46233 - DNA, 33 bp, Homo sapiens
atgtgcataacattccactttatcaatatcccc

SEQ ID NO: 46234 - DNA, 33 bp, Homo sapiens
ttgagaatcacagagacgtctggaaggataaca

SEQ ID NO: 46235 - DNA, 33 bp, Homo sapiens
ggggttatcagcatcacactagtgcccacctgg

SEQ ID NO: 46236 - DNA, 33 bp, Homo sapiens
aaattgcacagaaaacccttttccctccagcta

SEQ ID NO: 46237 - DNA, 33 bp, Homo sapiens
ccagaactgtaagcaccgggcacgggtcactgc

SEQ ID NO: 46238 - DNA, 33 bp, Homo sapiens
cagcttggaagaatcaaagggggatggttaaca

SEQ ID NO: 46239 - DNA, 33 bp, Homo sapiens
aggcttggatttgcatgaaattgatacagaaaa

SEQ ID NO: 46240 - DNA, 33 bp, Homo sapiens
tttacaggttgatgtaagattggccctgtgcag

SEQ ID NO: 46241 - DNA, 33 bp, Homo sapiens
gagcacacactggggaactatagacttctcaaa

SEQ ID NO: 46242 - DNA, 33 bp, Homo sapiens
cccactgcctggtcaactgggttgcagctcatc

SEQ ID NO: 46243 - DNA, 33 bp, Homo sapiens
accgatgcaagttccccgctactgctttttatt

SEQ ID NO: 46244 - DNA, 33 bp, Homo sapiens
ctcaagttcaaagccaaatggaaaatggcaagt

SEQ ID NO: 46245 - DNA, 33 bp, Homo sapiens
tacaatatagatcatgcaaaaagcttgtgaccc

SEQ ID NO: 46246 - DNA, 33 bp, Homo sapiens
gctgcttcaattgcacaaagaagaaattatagt

SEQ ID NO: 46247 - DNA, 33 bp, Homo sapiens
cctcagagaatggcgacattttatcactctgca

SEQ ID NO: 46248 - DNA, 33 bp, Homo sapiens
ttaaaaattactttcccatctgatctggctgtt

SEQ ID NO: 46249 - DNA, 33 bp, Homo sapiens
gatatatgaagagggaacaaaaggaactcacac

SEQ ID NO: 46250 - DNA, 33 bp, Homo sapiens
ctcctccaactcctcacgtggggctgaacatgg

SEQ ID NO: 46251 - DNA, 33 bp, Homo sapiens
tccaggttgatagctccatacctattaagacag

SEQ ID NO: 46252 - DNA, 33 bp, Homo sapiens
gctgcatggagtttaacatccttttaaatgcac

SEQ ID NO: 46253 - DNA, 33 bp, Homo sapiens
agaaacgtgatctcaaccaatctttgcaaatgg

SEQ ID NO: 46254 - DNA, 33 bp, Homo sapiens
agtgacattccaaaaaacagttgcatgctgaac

SEQ ID NO: 46255 - DNA, 51 bp, Homo sapiens
ggattcttaaaaaatcattatcctgcataaaatgtagacctatgcttggca

SEQ ID NO: 46256 - DNA, 33 bp, Homo sapiens
tcacagtgtatgaaacaaatgttagttactcca

SEQ ID NO: 46257 - DNA, 33 bp, Homo sapiens
gagccaggattttgtacgtggatgagattcttc

SEQ ID NO: 46258 - DNA, 33 bp, Homo sapiens
tttttataagaacaccaatcattggatttaggc

SEQ ID NO: 46259 - DNA, 33 bp, Homo sapiens
ctttcaaagttcttgacgagggtgatgaagcca

SEQ ID NO: 46260 - DNA, 33 bp, Homo sapiens
aatatagggtgaaggacgggtacctagtcaagg

SEQ ID NO: 46261 - DNA, 33 bp, Homo sapiens
aacttcaatgctaacacgggcggaaaaatcact

SEQ ID NO: 46262 - DNA, 33 bp, Homo sapiens
gtgaagtccaggagagacccatgaatatccgtg

SEQ ID NO: 46263 - DNA, 33 bp, Homo sapiens
tggtcattgtccctaacctgtgagaggaagtga

SEQ ID NO: 46264 - DNA, 33 bp, Homo sapiens
gggctaattatgcccaaatcatgatgggatgaa

SEQ ID NO: 46265 - DNA, 33 bp, Homo sapiens
ctgctaagagcctcaccgcagaatttcacgttt

SEQ ID NO: 46266 - DNA, 33 bp, Homo sapiens
gcttgatatctctcccaacattaaaatagcacc

SEQ ID NO: 46267 - DNA, 33 bp, Homo sapiens
gacatttgccttcttcaacattatttttaatgc

SEQ ID NO: 46268 - DNA, 33 bp, Homo sapiens
tattcataagacataaaatcgatggcacaaagt

SEQ ID NO: 46269 - DNA, 33 bp, Homo sapiens
acctgaaacagaaagacgggctcttagatcatc

SEQ ID NO: 46270 - DNA, 33 bp, Homo sapiens
ctggaaattgccctacaagatcatctgggcatc

SEQ ID NO: 46271 - DNA, 33 bp, Homo sapiens
tttgaaatacatctataactcagtatattagct

SEQ ID NO: 46272 - DNA, 33 bp, Homo sapiens
atgggcagtcatattacccaaatcaaatttctc

SEQ ID NO: 46273 - DNA, 33 bp, Homo sapiens
attttttgtgttaggaccattacaaatcttctt

SEQ ID NO: 46274 - DNA, 33 bp, Homo sapiens
aattcagtcacatcagccagtccttttcactat

SEQ ID NO: 46275 - DNA, 51 bp, Homo sapiens
tccattcagaaagaaagctcctgccatgtgttcactctatttaaatgatga

SEQ ID NO: 46276 - DNA, 51 bp, Homo sapiens
acacagcccagtcaatgcttcattaaagtgttgtgtgactctaatcagagg

SEQ ID NO: 46277 - DNA, 51 bp, Homo sapiens
accatacaactgatatgcaacaggacgaaagacaattgcaagtgactactg

SEQ ID NO: 46278 - DNA, 51 bp, Homo sapiens
tctattgtaccctcccatgaagccaatatagtgtataatcaattaaaaaat

SEQ ID NO: 46279 - DNA, 33 bp, Homo sapiens
ctgcacgtaggctcaaatatggctggcagcttg

SEQ ID NO: 46280 - DNA, 51 bp, Homo sapiens
aggcttcagttcggtgtaattactacggtttctaaaggagtttctgtgtaa

SEQ ID NO: 46281 - DNA, 51 bp, Homo sapiens
tcacatttacatactgtatgtcgaacctgaaaggaagctatgttcgaatag

SEQ ID NO: 46282 - DNA, 33 bp, Homo sapiens
aaaattggatcagtcaagaatcatttgcacaca

SEQ ID NO: 46283 - DNA, 33 bp, Homo sapiens
cctcagattctgcagcgaacaagaggttgagct

SEQ ID NO: 46284 - DNA, 33 bp, Homo sapiens
ctgtatccattatgatcacctacacatattaca

SEQ ID NO: 46285 - DNA, 33 bp, Homo sapiens
actttttgtttctgtaccagcaattttttagca

SEQ ID NO: 46286 - DNA, 33 bp, Homo sapiens
ttctgggacaccccagaaggattgtggtgaagg

SEQ ID NO: 46287 - DNA, 33 bp, Homo sapiens
gtggaaactcgtagccactcagtttcctcatct

SEQ ID NO: 46288 - DNA, 33 bp, Homo sapiens
tcactgttactaaatacccattacttggacttg

SEQ ID NO: 46289 - DNA, 33 bp, Homo sapiens
atggctcccacagccacagaaaggagatacaaa

SEQ ID NO: 46290 - DNA, 33 bp, Homo sapiens
aaatcacaactgctgacgatcacgagataatcc

SEQ ID NO: 46291 - DNA, 33 bp, Homo sapiens
cttcttttgtcttctacgatctatgaaagataa

SEQ ID NO: 46292 - DNA, 33 bp, Homo sapiens
gtgtctacacatccaacaatcagttttcgtaac

SEQ ID NO: 46293 - DNA, 33 bp, Homo sapiens
gcagatttctggccacactctttgatcacaaat

SEQ ID NO: 46294 - DNA, 33 bp, Homo sapiens
tgccttcttccctttccctcactgggttatatc

SEQ ID NO: 46295 - DNA, 33 bp, Homo sapiens
atagattcctagcagaaaacataattgtgagag

SEQ ID NO: 46296 - DNA, 33 bp, Homo sapiens
gagcccattcacacaaaggtctcattttattag

SEQ ID NO: 46297 - DNA, 33 bp, Homo sapiens
gtttagagaggaaaataggcagcatcattttgt

SEQ ID NO: 46298 - DNA, 33 bp, Homo sapiens
tcctggtttcatgaagccaaatactcctctttc

SEQ ID NO: 46299 - DNA, 33 bp, Homo sapiens
tttcgaatctcaacaccctgagctctgtgcttt

SEQ ID NO: 46300 - DNA, 33 bp, Homo sapiens
atgggtcaccaaagacacacaaaggtaagatgt

SEQ ID NO: 46301 - DNA, 33 bp, Homo sapiens
aaataacacaagagccagaacagaatgaatgtg

SEQ ID NO: 46302 - DNA, 33 bp, Homo sapiens
aatagttttaaaatcacggtcaaattctaagtc

SEQ ID NO: 46303 - DNA, 33 bp, Homo sapiens
attcagccgctcctaaataggtggccagattgt

SEQ ID NO: 46304 - DNA, 33 bp, Homo sapiens
gttttgtgactttagaaaccataggattaactg

SEQ ID NO: 46305 - DNA, 33 bp, Homo sapiens
aaggataaattcacaaacatgagcatccgtctc

SEQ ID NO: 46306 - DNA, 33 bp, Homo sapiens
aagcaacatgaactgcaccatcactgacttcta

SEQ ID NO: 46307 - DNA, 33 bp, Homo sapiens
gatggaagcgggaaccaaaagcctggctgagag

SEQ ID NO: 46308 - DNA, 33 bp, Homo sapiens
cgagtagccacaggacagaactgagaagcgagt

SEQ ID NO: 46309 - DNA, 33 bp, Homo sapiens
tagttacctagggcaacgctgatgcagataagt

SEQ ID NO: 46310 - DNA, 33 bp, Homo sapiens
gcccctcagagtgcacaggggatgatcttggag

SEQ ID NO: 46311 - DNA, 33 bp, Homo sapiens
atgaacaatccacaaccacaggcaacaaggtgg

SEQ ID NO: 46312 - DNA, 33 bp, Homo sapiens
accccctggctcactacgacaccaccgctgatg

SEQ ID NO: 46313 - DNA, 33 bp, Homo sapiens
agtgtgtggacagaacagacaatcttttctgcc

SEQ ID NO: 46314 - DNA, 51 bp, Homo sapiens
tctctacacactgcggtggaagacacggcccttcctgccaacgtgcacctc

SEQ ID NO: 46315 - DNA, 33 bp, Homo sapiens
gcattcatggactgtaacttagctctgttgaaa

SEQ ID NO: 46316 - DNA, 33 bp, Homo sapiens
tcttccaatctcatgcaaatttttttcctcctt

SEQ ID NO: 46317 - DNA, 33 bp, Homo sapiens
gaagatagctcaccccaagaatatgagtttctg

SEQ ID NO: 46318 - DNA, 33 bp, Homo sapiens
agaagagaggaatttcaacagccccgtacacaa

SEQ ID NO: 46319 - DNA, 51 bp, Homo sapiens
agacctgtgggggtgcaaatgcgaacgtgtgaggggtgctccgggacagct

SEQ ID NO: 46320 - DNA, 33 bp, Homo sapiens
ggcagattcaaaccacagacttcatggatatcg

SEQ ID NO: 46321 - DNA, 33 bp, Homo sapiens
gtgttaagcacttataacactatgtagctacta

SEQ ID NO: 46322 - DNA, 33 bp, Homo sapiens
atgaggagcaggagatcagcttacagttttctg

SEQ ID NO: 46323 - DNA, 33 bp, Homo sapiens
ttaagtaatcgacttacatagaaggtgtgcacc

SEQ ID NO: 46324 - DNA, 51 bp, Homo sapiens
aggtcatcctcaagagattacttccacctcaattcacacaggacaggtgat

SEQ ID NO: 46325 - DNA, 51 bp, Homo sapiens
gattgtacatttggttgtttctgctcacttacccatggtggccggcttcct

SEQ ID NO: 46326 - DNA, 33 bp, Homo sapiens
tgttttcacttattcaataattattcagtgtcc

SEQ ID NO: 46327 - DNA, 33 bp, Homo sapiens
gacaaggagcttgggaatagaagaagcaaaatt

SEQ ID NO: 46328 - DNA, 33 bp, Homo sapiens
gcccccacaatgccaccgggtactacaccgttt

SEQ ID NO: 46329 - DNA, 33 bp, Homo sapiens
tttctacaactgcaaacactattcagcaattta

SEQ ID NO: 46330 - DNA, 33 bp, Homo sapiens
aggccctatgctcctcacaccaatctagtaaga

SEQ ID NO: 46331 - DNA, 33 bp, Homo sapiens
atattcataagaaacaatagaagacaaaaatgt

SEQ ID NO: 46332 - DNA, 33 bp, Homo sapiens
taataacatttttcaactcacgaagattatgcc

SEQ ID NO: 46333 - DNA, 33 bp, Homo sapiens
catcctctttaaagtcaagtccatctaatataa

SEQ ID NO: 46334 - DNA, 33 bp, Homo sapiens
aagcccagcagcttgaaacataaagcgaggtgt

SEQ ID NO: 46335 - DNA, 33 bp, Homo sapiens
ttctgaatgataggacgctgcacagcatgcagt

SEQ ID NO: 46336 - DNA, 33 bp, Homo sapiens
cctaaggaaagagtcacgtatacacttacacag

SEQ ID NO: 46337 - DNA, 33 bp, Homo sapiens
gggctcagcttgtctacaataaacacaagataa

SEQ ID NO: 46338 - DNA, 33 bp, Homo sapiens
gctgccaattgaagtgaagattcaaggcaactt

SEQ ID NO: 46339 - DNA, 33 bp, Homo sapiens
ctttgtgcgctgtggacgttttccctatagtta

SEQ ID NO: 46340 - DNA, 33 bp, Homo sapiens
atttagaataaaggaacggctagacacagtggc

SEQ ID NO: 46341 - DNA, 33 bp, Homo sapiens
gaaatgcaagagacacagaatagtcaaagcaat

SEQ ID NO: 46342 - DNA, 33 bp, Homo sapiens
aagggtgcaccaacagcagagctcagatacaaa

SEQ ID NO: 46343 - DNA, 33 bp, Homo sapiens
ggttctggttaataaaattcactgttgtgtgaa

SEQ ID NO: 46344 - DNA, 33 bp, Homo sapiens
ccctggtgggaatcccaacttctccttatgcaa

SEQ ID NO: 46345 - DNA, 33 bp, Homo sapiens
gcccttgtgccattagcaaagcggaggctgggt

SEQ ID NO: 46346 - DNA, 33 bp, Homo sapiens
aatagtcacagatgtaagagttggaccaaatta

SEQ ID NO: 46347 - DNA, 33 bp, Homo sapiens
tgagaatactcaagaaatggttatcttgggtag

SEQ ID NO: 46348 - DNA, 33 bp, Homo sapiens
ataaaatgtacaaaagcatatccagtgaaaaat

SEQ ID NO: 46349 - DNA, 33 bp, Homo sapiens
aatcaagttccatcaacaatttttagctggaaa

SEQ ID NO: 46350 - DNA, 33 bp, Homo sapiens
atctaccgcgaccagccgaagtagggtgcaaag

SEQ ID NO: 46351 - DNA, 33 bp, Homo sapiens
ttctgaggaccatacaaatcggttttccaccta

SEQ ID NO: 46352 - DNA, 33 bp, Homo sapiens
gatgtttgcatataggcacatttagctggatta

SEQ ID NO: 46353 - DNA, 33 bp, Homo sapiens
agtatttagtcagcaacgtaccattatagaaaa

SEQ ID NO: 46354 - DNA, 51 bp, Homo sapiens
gtgtctggtacatgtgtatgtgtaacagggaaacgcattctagattcaaag

SEQ ID NO: 46355 - DNA, 33 bp, Homo sapiens
gaattcggcctctcaagcagtcttgtagtagtg

SEQ ID NO: 46356 - DNA, 33 bp, Homo sapiens
gagcatcaaagagcccagacaagtgagaatcaa

SEQ ID NO: 46357 - DNA, 33 bp, Homo sapiens
tcatctgtcttgtcccacaaaggccaagacaaa

SEQ ID NO: 46358 - DNA, 33 bp, Homo sapiens
cactgtcgcttctccacggcattagattttcag

SEQ ID NO: 46359 - DNA, 33 bp, Homo sapiens
taaatgaacatccatcccgaggcgggcagagga

SEQ ID NO: 46360 - DNA, 33 bp, Homo sapiens
aggcagaaccagcagacaggaaggtgacacagt

SEQ ID NO: 46361 - DNA, 33 bp, Homo sapiens
cccatgctgggacaagaaatgaagttttgatat

SEQ ID NO: 46362 - DNA, 33 bp, Homo sapiens
ttggcattatctgttacctatcgacaattaata

SEQ ID NO: 46363 - DNA, 33 bp, Homo sapiens
actggtaatattgcccaatgaactttaaagggt

SEQ ID NO: 46364 - DNA, 33 bp, Homo sapiens
actgaaggagacaacacgtagcctttgctgggg

SEQ ID NO: 46365 - DNA, 33 bp, Homo sapiens
tattttaacaaattccatgattgtcagttacct

SEQ ID NO: 46366 - DNA, 33 bp, Homo sapiens
acgacaataaccaagcaaaggggaaatatacag

SEQ ID NO: 46367 - DNA, 33 bp, Homo sapiens
gtcagtcctcagctcacgtctacttggttcttt

SEQ ID NO: 46368 - DNA, 33 bp, Homo sapiens
aagagagatcccttcaatctggaaagctgacag

SEQ ID NO: 46369 - DNA, 33 bp, Homo sapiens
tgcccacctgtctaggccatgcatcggcttgta

SEQ ID NO: 46370 - DNA, 33 bp, Homo sapiens
gggcaaaataacattggaaggtagattgtcacc

SEQ ID NO: 46371 - DNA, 33 bp, Homo sapiens
tccgaggacctaatccacaagtgtagtttcagt

SEQ ID NO: 46372 - DNA, 33 bp, Homo sapiens
gtggtctgtccctaaagcttgtgctggagaccc

SEQ ID NO: 46373 - DNA, 33 bp, Homo sapiens
aaactcactctactaaatgaaaaacaacaaaaa

SEQ ID NO: 46374 - DNA, 33 bp, Homo sapiens
tgagccctgtgtcctacaaagaccctgagagcc

SEQ ID NO: 46375 - DNA, 33 bp, Homo sapiens
gtgtgtgagacactcaataacggcaagaggatg

SEQ ID NO: 46376 - DNA, 33 bp, Homo sapiens
cacccgctcctcaaaaagaataaccagactcag

SEQ ID NO: 46377 - DNA, 33 bp, Homo sapiens
ctcctattaagaccaaaggaccaataactagaa

SEQ ID NO: 46378 - DNA, 33 bp, Homo sapiens
cagagcccgacaaaggaatgacaaaaatatcct

SEQ ID NO: 46379 - DNA, 33 bp, Homo sapiens
aatcaaattgctaaagaacagtgatgaagagac

SEQ ID NO: 46380 - DNA, 33 bp, Homo sapiens
gtttctctgtctccaacgtcacttccggcaggt

SEQ ID NO: 46381 - DNA, 33 bp, Homo sapiens
catcatgatgggtgcgccattctgtaatccaga

SEQ ID NO: 46382 - DNA, 33 bp, Homo sapiens
tacctatggacttatagcaccatttacaatgca

SEQ ID NO: 46383 - DNA, 33 bp, Homo sapiens
gtatctgcttcagtgaggtaactgtgcacctgc

SEQ ID NO: 46384 - DNA, 33 bp, Homo sapiens
tgtcacttggaactccaggaaaccagtctctgg

SEQ ID NO: 46385 - DNA, 33 bp, Homo sapiens
cacctcgaatgcaaaaattaaaggagcatccaa

SEQ ID NO: 46386 - DNA, 33 bp, Homo sapiens
cagactgacttccagaaaagagagcctgaactg

SEQ ID NO: 46387 - DNA, 33 bp, Homo sapiens
taccacatgcctgggaagattctaaatgcttac

SEQ ID NO: 46388 - DNA, 33 bp, Homo sapiens
agccttagaaggatgaactggagaactggaggc

SEQ ID NO: 46389 - DNA, 33 bp, Homo sapiens
agacgatgacgtgcaccgaggagaagttgttga

SEQ ID NO: 46390 - DNA, 33 bp, Homo sapiens
aagtcacagtggtccaagccaaaggggatgcag

SEQ ID NO: 46391 - DNA, 33 bp, Homo sapiens
ccattcagtagaagggcaaagaggcccacatgt

SEQ ID NO: 46392 - DNA, 33 bp, Homo sapiens
gtgctgaggacagtagaaaagaacgtaggaagt

SEQ ID NO: 46393 - DNA, 33 bp, Homo sapiens
tttgtgaactcactccagctaacagttgacatg

SEQ ID NO: 46394 - DNA, 33 bp, Homo sapiens
tctgtttcaggtactacgctagtctcttcccac

SEQ ID NO: 46395 - DNA, 33 bp, Homo sapiens
ctgcggtttcaaaagacagcaagtagggtttct

SEQ ID NO: 46396 - DNA, 33 bp, Homo sapiens
gcaggcgggtcccccaaaggataagattatgta

SEQ ID NO: 46397 - DNA, 33 bp, Homo sapiens
gtcctaggcccagaaactccttcatcaagccag

SEQ ID NO: 46398 - DNA, 33 bp, Homo sapiens
gcaagattttgtcaccaagctgagcatttactg

SEQ ID NO: 46399 - DNA, 33 bp, Homo sapiens
caccacaggtaccaacaaggtgaatggagcaaa

SEQ ID NO: 46400 - DNA, 33 bp, Homo sapiens
gtaatgttcggaactcaaaatagtgacaaggat

SEQ ID NO: 46401 - DNA, 33 bp, Homo sapiens
ggtatacctgctatggaaaagagccagaggata

SEQ ID NO: 46402 - DNA, 33 bp, Homo sapiens
tcttttctgggcttcagcatctgtatctgtcaa

SEQ ID NO: 46403 - DNA, 33 bp, Homo sapiens
aaccgcaatcacaataccttaagcccatatcaa

SEQ ID NO: 46404 - DNA, 33 bp, Homo sapiens
aagaaaaagtcacaatcatggtgataatgaaga

SEQ ID NO: 46405 - DNA, 51 bp, Homo sapiens
atattgaataatgccatcactattacaggatcaccaccatcatcttcatta

SEQ ID NO: 46406 - DNA, 33 bp, Homo sapiens
cagaaacaagactggaatacaaaaatagagact

SEQ ID NO: 46407 - DNA, 33 bp, Homo sapiens
aggtggttggccccaaattagctttccactctg

SEQ ID NO: 46408 - DNA, 33 bp, Homo sapiens
ggtgggcaaggaaccagaccatgctgggaacag

SEQ ID NO: 46409 - DNA, 33 bp, Homo sapiens
ggggcctgggcagtgaagaggagccagccaggt

SEQ ID NO: 46410 - DNA, 33 bp, Homo sapiens
aataattaaacatcccaaatgtcagttgtgcgg

SEQ ID NO: 46411 - DNA, 33 bp, Homo sapiens
cacatcagctaacacaagctatttctagagtga

SEQ ID NO: 46412 - DNA, 33 bp, Homo sapiens
gtgtactttgaaaccaatcagtgtaattaacca

SEQ ID NO: 46413 - DNA, 33 bp, Homo sapiens
aggaggctagtccaaaatgagaggtcctgttag

SEQ ID NO: 46414 - DNA, 33 bp, Homo sapiens
ggggccaataatatgacctagcacagggatatt

SEQ ID NO: 46415 - DNA, 33 bp, Homo sapiens
aaggaaaccaattcgcccctagacccttcagaa

SEQ ID NO: 46416 - DNA, 33 bp, Homo sapiens
taaacagcaaaaactaactgaatcaccagagga

SEQ ID NO: 46417 - DNA, 51 bp, Homo sapiens
attataatagctcattgctccttacatgtcagaagcacctctgggctgtgg

SEQ ID NO: 46418 - DNA, 33 bp, Homo sapiens
aatgatattgccacataagccctactgaaacaa

SEQ ID NO: 46419 - DNA, 33 bp, Homo sapiens
ccaagaaccgaggacaaataagtacaagggaac

SEQ ID NO: 46420 - DNA, 33 bp, Homo sapiens
ccaagctcttccctccactgctattgaccatgt

SEQ ID NO: 46421 - DNA, 33 bp, Homo sapiens
ggaacgaggaccagaacacctgaatgggtagtt

SEQ ID NO: 46422 - DNA, 33 bp, Homo sapiens
gagagtggacagaatacgggcgagatgcttacg

SEQ ID NO: 46423 - DNA, 33 bp, Homo sapiens
aactggctcctgaattcaatctctgtatttgtg

SEQ ID NO: 46424 - DNA, 33 bp, Homo sapiens
aatactgaattcaggacggtggttactctgtgg

SEQ ID NO: 46425 - DNA, 33 bp, Homo sapiens
cacacagtcactgaacactataggttggtggtc

SEQ ID NO: 46426 - DNA, 33 bp, Homo sapiens
ggggcggctgtgtgaaaggccgtcctgtttgag

SEQ ID NO: 46427 - DNA, 33 bp, Homo sapiens
tgaatctgacatagtcacacctgcagagaactc

SEQ ID NO: 46428 - DNA, 33 bp, Homo sapiens
gctgaactgggaagtaggtctaatgaagtctaa

SEQ ID NO: 46429 - DNA, 33 bp, Homo sapiens
acacaaacctggatgcaatagcgtactacacac

SEQ ID NO: 46430 - DNA, 33 bp, Homo sapiens
aagaataccactgctccaagaggttacctgcct

SEQ ID NO: 46431 - DNA, 33 bp, Homo sapiens
cgcgaggcagaagttacaatgtccgccaagcgg

SEQ ID NO: 46432 - DNA, 33 bp, Homo sapiens
ttcctgtgcgtcattacgctgtggttctcatag

SEQ ID NO: 46433 - DNA, 33 bp, Homo sapiens
gatcttcttggcttgccacttatgttatggaac

SEQ ID NO: 46434 - DNA, 33 bp, Homo sapiens
cttcacagggcgagtaccaacacgctctgcagc

SEQ ID NO: 46435 - DNA, 33 bp, Homo sapiens
caagttgcttcaactaccgaagccttagcttcc

SEQ ID NO: 46436 - DNA, 33 bp, Homo sapiens
tgtccaggctagcagaatcctgtcacctacgag

SEQ ID NO: 46437 - DNA, 33 bp, Homo sapiens
cagaggtagaaacgaacctaacataaattcagt

SEQ ID NO: 46438 - DNA, 33 bp, Homo sapiens
ggaattgaggagtaaaaagaagacatagatgga

SEQ ID NO: 46439 - DNA, 33 bp, Homo sapiens
aactgtgtgaccttcagcaagtgatttaacttc

SEQ ID NO: 46440 - DNA, 33 bp, Homo sapiens
acatcactgtgaattaacatcttagtccaggaa

SEQ ID NO: 46441 - DNA, 33 bp, Homo sapiens
tcccctgatgcaatgaaagggtgagcaatttca

SEQ ID NO: 46442 - DNA, 33 bp, Homo sapiens
taagtgtggcataaggcaatggaaaacgctata

SEQ ID NO: 46443 - DNA, 33 bp, Homo sapiens
aataactgacatagcaatagaatgggcctgaga

SEQ ID NO: 46444 - DNA, 33 bp, Homo sapiens
ccctcaaccagtgaagaatgagaagttggtggc

SEQ ID NO: 46445 - DNA, 33 bp, Homo sapiens
catggggctgtcagaacatttaatatggggccc

SEQ ID NO: 46446 - DNA, 33 bp, Homo sapiens
agatgattctcactgaagccgcgtgatgatggg

SEQ ID NO: 46447 - DNA, 33 bp, Homo sapiens
tgtcccaaccaacagacggtatttagcacctct

SEQ ID NO: 46448 - DNA, 33 bp, Homo sapiens
tcaatgcctcacctcagccctttctcatctgag

SEQ ID NO: 46449 - DNA, 33 bp, Homo sapiens
gtggcttgtttctttccctgtctatcctagaaa

SEQ ID NO: 46450 - DNA, 33 bp, Homo sapiens
ttctctgatctggtccactcattaaggctatag

SEQ ID NO: 46451 - DNA, 33 bp, Homo sapiens
aaggtgggaaaaatgaggaggcatgtacaaggc

SEQ ID NO: 46452 - DNA, 33 bp, Homo sapiens
actaaaccttgttccaaatctgatcagtcttca

SEQ ID NO: 46453 - DNA, 33 bp, Homo sapiens
ccacactgctactcaaaatgtgggcgacagatc

SEQ ID NO: 46454 - DNA, 33 bp, Homo sapiens
gatgtcttgaaagaatcagtgtgaaaatgagat

SEQ ID NO: 46455 - DNA, 33 bp, Homo sapiens
taatgcccagtaaaaaacaggaaagatgtcttg

SEQ ID NO: 46456 - DNA, 33 bp, Homo sapiens
ccgttttctgcccaacaggagaataaaggaagc

SEQ ID NO: 46457 - DNA, 33 bp, Homo sapiens
cacaaagttgttagagaaatcagaagaaatttt

SEQ ID NO: 46458 - DNA, 33 bp, Homo sapiens
ggatgtgaatctagaccatcctgaccccgtcat

SEQ ID NO: 46459 - DNA, 33 bp, Homo sapiens
atggctcaacagacatcaccaggaaaacagaga

SEQ ID NO: 46460 - DNA, 33 bp, Homo sapiens
atgtggttcaaggagaaccttctgggtaaaaga

SEQ ID NO: 46461 - DNA, 33 bp, Homo sapiens
aatatttattgaatgacggaaatagtctttcta

SEQ ID NO: 46462 - DNA, 33 bp, Homo sapiens
acctcaaacacctaccaagggctagcagtttat

SEQ ID NO: 46463 - DNA, 33 bp, Homo sapiens
gccagctagtggcctacaatcccttctaaccag

SEQ ID NO: 46464 - DNA, 33 bp, Homo sapiens
atgccatcttgaaccaataatttcatttctctg

SEQ ID NO: 46465 - DNA, 51 bp, Homo sapiens
caaggtcaaaggggatataagcacacgctctttctttataaacacaggtca

SEQ ID NO: 46466 - DNA, 33 bp, Homo sapiens
ttggaattgtatctcccatggccctggattctt

SEQ ID NO: 46467 - DNA, 33 bp, Homo sapiens
ctaagagacacttggaaatgtttgtcggtttca

SEQ ID NO: 46468 - DNA, 33 bp, Homo sapiens
ttggatgtgcaccttacggctgtttatagcaat

SEQ ID NO: 46469 - DNA, 33 bp, Homo sapiens
aaggaacttgtcctaccaggcattctgtaatca

SEQ ID NO: 46470 - DNA, 33 bp, Homo sapiens
gtgaaagtcttttacacggcagtgaacagtaaa

SEQ ID NO: 46471 - DNA, 33 bp, Homo sapiens
atgtgtagtaataagaaaaaatatgggctttga

SEQ ID NO: 46472 - DNA, 33 bp, Homo sapiens
ttttacagaatatgggacactagttagactggt

SEQ ID NO: 46473 - DNA, 33 bp, Homo sapiens
gtgccttcaacccggcagatcaaagatgaatgt

SEQ ID NO: 46474 - DNA, 33 bp, Homo sapiens
ttttttaattctctccacaattagagccaggcc

SEQ ID NO: 46475 - DNA, 33 bp, Homo sapiens
agagaccggggcttaaatccaggtatgttttct

SEQ ID NO: 46476 - DNA, 33 bp, Homo sapiens
aacgagttagctgttacctcctctcagatgtca

SEQ ID NO: 46477 - DNA, 33 bp, Homo sapiens
atccgatgttgtcaccactagacatgggtagtt

SEQ ID NO: 46478 - DNA, 33 bp, Homo sapiens
gagtactagagtttgcacccttgttaggaactc

SEQ ID NO: 46479 - DNA, 33 bp, Homo sapiens
agcttttcagaagtcactacaggagctagctta

SEQ ID NO: 46480 - DNA, 33 bp, Homo sapiens
cagccactggtgtgcagcaaaaaggaaagttta

SEQ ID NO: 46481 - DNA, 33 bp, Homo sapiens
aaaacacggaaataacaattctaggtaaatttt

SEQ ID NO: 46482 - DNA, 33 bp, Homo sapiens
taagtgaaacaacagacggaaaggtagctgaca

SEQ ID NO: 46483 - DNA, 33 bp, Homo sapiens
cctgctcacttcagaactgctagagaagaagtt

SEQ ID NO: 46484 - DNA, 33 bp, Homo sapiens
tcatgatcacctctgaatacagcaaagacaggg

SEQ ID NO: 46485 - DNA, 33 bp, Homo sapiens
aagtctatccatccagaaagaagaggaaagaag

SEQ ID NO: 46486 - DNA, 33 bp, Homo sapiens
aagtgggcattatccaagcaaaagaatgtggga

SEQ ID NO: 46487 - DNA, 33 bp, Homo sapiens
cgtgttaggcagtggacatacaaatataaagta

SEQ ID NO: 46488 - DNA, 33 bp, Homo sapiens
aggaagagctcgttggcaaatcaaaggtgacaa

SEQ ID NO: 46489 - DNA, 33 bp, Homo sapiens
cagggtagttacagaacaaggcttagcagtcag

SEQ ID NO: 46490 - DNA, 33 bp, Homo sapiens
acccttctagattgacagaactagtgagcagca

SEQ ID NO: 46491 - DNA, 33 bp, Homo sapiens
gacaggagcaccttgccgactctaaagtctcag

SEQ ID NO: 46492 - DNA, 33 bp, Homo sapiens
gtgtgtgcacccagaacgaatcctggagaacca

SEQ ID NO: 46493 - DNA, 33 bp, Homo sapiens
ttgtatacagtcaatcacttgctactgcacaca

SEQ ID NO: 46494 - DNA, 33 bp, Homo sapiens
tgagtcatgtatacacactcatggtaaatgact

SEQ ID NO: 46495 - DNA, 33 bp, Homo sapiens
taaaatgacctgtctaccaaaaacagccttcag

SEQ ID NO: 46496 - DNA, 33 bp, Homo sapiens
caagcagacattttggaaagattattcgtggaa

SEQ ID NO: 46497 - DNA, 33 bp, Homo sapiens
agaaatttgaggatccaaggaaaactactgggg

SEQ ID NO: 46498 - DNA, 33 bp, Homo sapiens
gatggtaagactctgcactgtaaggactaaatt

SEQ ID NO: 46499 - DNA, 33 bp, Homo sapiens
ctaggagcagagcgccaccgatgacaggcccat

SEQ ID NO: 46500 - DNA, 33 bp, Homo sapiens
gcacccaaagcgccagcaagttagctccatgat

SEQ ID NO: 46501 - DNA, 33 bp, Homo sapiens
ggggtggtttcagagacagtaaggatacaggag

SEQ ID NO: 46502 - DNA, 33 bp, Homo sapiens
acagagcggggtcttaaggaatactgcaccaac

SEQ ID NO: 46503 - DNA, 33 bp, Homo sapiens
aaattatatcatacaaactacaatttccatttc

SEQ ID NO: 46504 - DNA, 33 bp, Homo sapiens
ggaagtctatagcggacgatttttgtatatttc

SEQ ID NO: 46505 - DNA, 33 bp, Homo sapiens
agtctgtattttcctacctcttttgtgcatggg

SEQ ID NO: 46506 - DNA, 51 bp, Homo sapiens
ccttctctttggccaggctttaagaacaagatgggtccactcattactgat

SEQ ID NO: 46507 - DNA, 51 bp, Homo sapiens
catgagaccttatgcccaaactgacagccattccaggcccatcactcactg

SEQ ID NO: 46508 - DNA, 33 bp, Homo sapiens
tattccagatctccaacgttacaggcgagaacc

SEQ ID NO: 46509 - DNA, 33 bp, Homo sapiens
accaggccttcatcacaccaggagagagtgcct

SEQ ID NO: 46510 - DNA, 33 bp, Homo sapiens
ctgggacattcctgccaggagagagtcaggccc

SEQ ID NO: 46511 - DNA, 33 bp, Homo sapiens
acccgtatcccactcactatcaagaagcaactc

SEQ ID NO: 46512 - DNA, 33 bp, Homo sapiens
acaggctgaaatgttacctggaggcctcaggca

SEQ ID NO: 46513 - DNA, 33 bp, Homo sapiens
tggaaagtgtttcaaacggtcagtaactggcta

SEQ ID NO: 46514 - DNA, 33 bp, Homo sapiens
ttacttgccagacaaacggactttgggcacatg

SEQ ID NO: 46515 - DNA, 33 bp, Homo sapiens
agacatgagtcatcgaaaggctatctaaaccga

SEQ ID NO: 46516 - DNA, 33 bp, Homo sapiens
tgcaaatcaatcttcccgaggcaatttcctgtt

SEQ ID NO: 46517 - DNA, 33 bp, Homo sapiens
attagggcaaaaacatgagggttgaagtgaagt

SEQ ID NO: 46518 - DNA, 33 bp, Homo sapiens
tgacccaatcacagccaaccagatcaacgagag

SEQ ID NO: 46519 - DNA, 33 bp, Homo sapiens
gctgccttccaaataaccataactttggtggga

SEQ ID NO: 46520 - DNA, 33 bp, Homo sapiens
ctaaaggcataaaaaaacgttgaattatagcag

SEQ ID NO: 46521 - DNA, 33 bp, Homo sapiens
actgaaatgaatgtaaatgtggatatgacaact

SEQ ID NO: 46522 - DNA, 33 bp, Homo sapiens
tgttgagtatcatgaaatcttcctatttggagc

SEQ ID NO: 46523 - DNA, 33 bp, Homo sapiens
tgatcttcaacctgcacagcaataacatcttat

SEQ ID NO: 46524 - DNA, 33 bp, Homo sapiens
ggaactgaacacagctaaagtagagagccagaa

SEQ ID NO: 46525 - DNA, 33 bp, Homo sapiens
atgaggaagtttcacactgctattaaaatattg

SEQ ID NO: 46526 - DNA, 33 bp, Homo sapiens
agtcagaaaacttatccacatccaggcagcctg

SEQ ID NO: 46527 - DNA, 33 bp, Homo sapiens
cgaggatgaaaacacacacggttctgaagatcc

SEQ ID NO: 46528 - DNA, 33 bp, Homo sapiens
gcaaaaaatggaatgaaatgaagaaaaaggcta

SEQ ID NO: 46529 - DNA, 33 bp, Homo sapiens
gccgagcttaggtccaatgaagaggatcagagg

SEQ ID NO: 46530 - DNA, 33 bp, Homo sapiens
cttaatttttaattccccatgcctgctgacagg

SEQ ID NO: 46531 - DNA, 33 bp, Homo sapiens
catctgaagctccaaaaaattttcagcctttgt

SEQ ID NO: 46532 - DNA, 33 bp, Homo sapiens
ctacactgaacaaatacgtcgactgatgagtaa

SEQ ID NO: 46533 - DNA, 33 bp, Homo sapiens
tttttgtccacttgaaacttgtctagtgctttt

SEQ ID NO: 46534 - DNA, 33 bp, Homo sapiens
agttggcccctgttccgacacagtccaaatcca

SEQ ID NO: 46535 - DNA, 33 bp, Homo sapiens
ctgccacttcccgacacgtgatttgttgccacc

SEQ ID NO: 46536 - DNA, 51 bp, Homo sapiens
tgctctagagtctggtggcctccaaaaccactatctgggtagcctcaggcg

SEQ ID NO: 46537 - DNA, 33 bp, Homo sapiens
gagggtgcctgttgtacacttagcatggcacca

SEQ ID NO: 46538 - DNA, 51 bp, Homo sapiens
agagatcatttatcttattaaaacaataggcaagagtcatcaaagtggaaa

SEQ ID NO: 46539 - DNA, 51 bp, Homo sapiens
ctttgttgttggagacaatacattacagcgaacagagacttctttttctag

SEQ ID NO: 46540 - DNA, 33 bp, Homo sapiens
atgaaggcgcgctttcaagtaagcgagtgagga

SEQ ID NO: 46541 - DNA, 33 bp, Homo sapiens
ggtgaatggatacacgaacagcagtaattgaca

SEQ ID NO: 46542 - DNA, 51 bp, Homo sapiens
ttaaaaacagaccgtgatgcttttacatacagacccacactgtccatgact

SEQ ID NO: 46543 - DNA, 33 bp, Homo sapiens
accaacttagtgccacagaagctcaactgtctc

SEQ ID NO: 46544 - DNA, 33 bp, Homo sapiens
gagatgggaagcctgacgcgcccccgttgcacc

SEQ ID NO: 46545 - DNA, 33 bp, Homo sapiens
tggggccccgagctgacgtaggtaggcttggga

SEQ ID NO: 46546 - DNA, 33 bp, Homo sapiens
gaaggaactggagacaatcacatggaagaagcc

SEQ ID NO: 46547 - DNA, 33 bp, Homo sapiens
ctgagcaagaaacttcacagtctgagttcagta

SEQ ID NO: 46548 - DNA, 33 bp, Homo sapiens
tggtcatcaccaataacgtgccgttgcaaactg

SEQ ID NO: 46549 - DNA, 33 bp, Homo sapiens
agcaccccatcaacgaacgaagggaagccccag

SEQ ID NO: 46550 - DNA, 33 bp, Homo sapiens
acacgatagaatatgacatggcatgaaaagaag

SEQ ID NO: 46551 - DNA, 33 bp, Homo sapiens
agactctgaggccagaagctagagtgtggctcc

SEQ ID NO: 46552 - DNA, 33 bp, Homo sapiens
tcagacaatcctctacacttggaaatttgagtt

SEQ ID NO: 46553 - DNA, 51 bp, Homo sapiens
ggggcagaatgttgaccacagattgaaagttaggtgaaagctgatttccgc

SEQ ID NO: 46554 - DNA, 33 bp, Homo sapiens
gactccgggttttttgaagctcagtgagcagca

SEQ ID NO: 46555 - DNA, 33 bp, Homo sapiens
ggagaccaatgtttctaaagccagcagcagaag

SEQ ID NO: 46556 - DNA, 33 bp, Homo sapiens
ttaaataacattgatccaaatttttattgcagc

SEQ ID NO: 46557 - DNA, 33 bp, Homo sapiens
aatgcctttccctctacggaccgagcagaaaga

SEQ ID NO: 46558 - DNA, 33 bp, Homo sapiens
ttgtcctctaactccacccaatcaatcatgagg

SEQ ID NO: 46559 - DNA, 33 bp, Homo sapiens
gactgcatcatttaagaattaaactggccccta

SEQ ID NO: 46560 - DNA, 33 bp, Homo sapiens
ccaaaaaacacccagacaactagataggaaaaa

SEQ ID NO: 46561 - DNA, 33 bp, Homo sapiens
tggctctgcccttcccagatgttctgtgatggg

SEQ ID NO: 46562 - DNA, 33 bp, Homo sapiens
gtcccgtttcaggcaacgcagtcacttgcactg

SEQ ID NO: 46563 - DNA, 33 bp, Homo sapiens
acctaaaatattcaccaacaaatagactgtact

SEQ ID NO: 46564 - DNA, 33 bp, Homo sapiens
cagctgggacagctgccctcggctccatgtggt

SEQ ID NO: 46565 - DNA, 33 bp, Homo sapiens
gttctctctttcccagacggcctctcaggatcc

SEQ ID NO: 46566 - DNA, 33 bp, Homo sapiens
gaggcaaaagttggagaaaatagttctagaaaa

SEQ ID NO: 46567 - DNA, 33 bp, Homo sapiens
tgtaacttcaggcacaagtatcctttacttcat

SEQ ID NO: 46568 - DNA, 33 bp, Homo sapiens
cccccatgtgagttataacacttgatgaatgaa

SEQ ID NO: 46569 - DNA, 33 bp, Homo sapiens
tcccatcccaatgtaacgactgatggttgagca

SEQ ID NO: 46570 - DNA, 33 bp, Homo sapiens
gctgaggtgagcaaggacagtggacgtcactgc

SEQ ID NO: 46571 - DNA, 33 bp, Homo sapiens
ggctttcttagcatgacgccagtggcaaaaaca

SEQ ID NO: 46572 - DNA, 51 bp, Homo sapiens
ttgtgacctctcaccctgagctgcacaccttctgtttcgtgatccgcgtgc

SEQ ID NO: 46573 - DNA, 33 bp, Homo sapiens
cttctgtataacattacagtgaaagctctagct

SEQ ID NO: 46574 - DNA, 33 bp, Homo sapiens
tgaggatttatgccgagctccagacgtacagga

SEQ ID NO: 46575 - DNA, 33 bp, Homo sapiens
gtatgtgtatacagtacgtgttgcagcgtgtat

SEQ ID NO: 46576 - DNA, 33 bp, Homo sapiens
ggaaatcaacaagacacggcagataactggatg

SEQ ID NO: 46577 - DNA, 33 bp, Homo sapiens
tctgtagaaaacctgccgagggaagagctcaca

SEQ ID NO: 46578 - DNA, 33 bp, Homo sapiens
gtgattttagggtaaacgctcctctcttgtgct

SEQ ID NO: 46579 - DNA, 33 bp, Homo sapiens
atctgaaaccacattcactttcctctcaccagg

SEQ ID NO: 46580 - DNA, 33 bp, Homo sapiens
aggtggtgatagagacagagtcagctgggtaaa

SEQ ID NO: 46581 - DNA, 33 bp, Homo sapiens
acagtgtgaatatgccaggaaaagggagggttc

SEQ ID NO: 46582 - DNA, 33 bp, Homo sapiens
gaatacatgaacagaaatggattttgattgatg

SEQ ID NO: 46583 - DNA, 33 bp, Homo sapiens
tccgctgcagggtccaacgccgcccaggtctct

SEQ ID NO: 46584 - DNA, 33 bp, Homo sapiens
gtccagcttcatagagacactatgtcctcaagt

SEQ ID NO: 46585 - DNA, 51 bp, Homo sapiens
tacatatgcacgcacatacatgcacatccacaatccatgttcctatgcacc

SEQ ID NO: 46586 - DNA, 33 bp, Homo sapiens
ctgcctctaaacccgaagtcttcaagcctgact

SEQ ID NO: 46587 - DNA, 33 bp, Homo sapiens
cctgcaggcggccttcacaatatctgacgttag

SEQ ID NO: 46588 - DNA, 33 bp, Homo sapiens
tctggaaaaaatactacgttgttcaattgttct

SEQ ID NO: 46589 - DNA, 33 bp, Homo sapiens
gagctgagcttcctcacctagaattgctgaaca

SEQ ID NO: 46590 - DNA, 33 bp, Homo sapiens
gattatgtgtgaagaaaattcaaggtaatctac

SEQ ID NO: 46591 - DNA, 33 bp, Homo sapiens
tcaacaccatgcctacagattgcctcagccaaa

SEQ ID NO: 46592 - DNA, 51 bp, Homo sapiens
cataatggatgactattcagcaggagaatgaatggagcattgataattttt

SEQ ID NO: 46593 - DNA, 33 bp, Homo sapiens
ggcttctataaggatcccacgagccactctgta

SEQ ID NO: 46594 - DNA, 33 bp, Homo sapiens
atactggcctcaaaacaattcgggaagtatctt

SEQ ID NO: 46595 - DNA, 33 bp, Homo sapiens
agccagcttgtgggcaaccctggattaagaggt

SEQ ID NO: 46596 - DNA, 33 bp, Homo sapiens
gaagaagaggacaaagacagtttcttatcatct

SEQ ID NO: 46597 - DNA, 33 bp, Homo sapiens
tgacctcgcgtttatacccagggattcttggtt

SEQ ID NO: 46598 - DNA, 33 bp, Homo sapiens
tcccattaagacaaatgacttcgactcatgaag

SEQ ID NO: 46599 - DNA, 33 bp, Homo sapiens
tcttaaaatgcaaggacgctcatagtgtttgcc

SEQ ID NO: 46600 - DNA, 33 bp, Homo sapiens
agtggaagtttgagggcactctcacaaaatgat

SEQ ID NO: 46601 - DNA, 33 bp, Homo sapiens
gctacttatgctcaagcccttttctcagggtgc

SEQ ID NO: 46602 - DNA, 33 bp, Homo sapiens
tggcagtgccgggccacggtaggtacgtgaaga

SEQ ID NO: 46603 - DNA, 33 bp, Homo sapiens
gatcagataaattggtaaacttgatagcaagtc

SEQ ID NO: 46604 - DNA, 33 bp, Homo sapiens
actcattaaatcttcacaaaagcccagtgctga

SEQ ID NO: 46605 - DNA, 33 bp, Homo sapiens
ttcaagcgtcttctccaccttgaccctgccacc

SEQ ID NO: 46606 - DNA, 33 bp, Homo sapiens
tgtttccataagatgcaaggaacaggtcacgta
